(19) United States
(12) Patent Application Publication
(10) Pub. No.: US 2014/0234359 A1
(43) Pub. Date: Aug. 21, 2014

(54) PLANT VIRAL VACCINES AND THERAPEUTICS

(71) Applicants: Martha Karen Newell, Holland, TX (US); Richard Tobin, Aurora, CO (US); Susannah K. Rogers, Holland, TX (US)

(72) Inventors: Martha Karen Newell, Holland, TX (US); Richard Tobin, Aurora, CO (US); Susannah K. Rogers, Holland, TX (US)

(73) Assignees: Viral Genetics, Inc., San Marino, CA (US); Scott & White Healthcare, Temple, TX (US); The Texas A&M University System, College Station, TX (US)

(21) Appl. No.: 14/346,214

(22) PCT Filed: Sep. 21, 2012
(86) PCT No.: PCT/US12/56621

§ 371 Date: Mar. 20, 2014

Related U.S. Application Data
(60) Provisional application No. 61/537,306, filed on Sep. 21, 2011.

(51) Int. Cl. A61K 39/12; A61K 39/39; C12Q 1/70; C07K 14/005; C12N 15/113

(52) U.S. Cl. CPC A61K 39/12; C07K 14/005; C12N 15/1131; C12Q 1/70; A61K 39/39
USPC 424/186.1; 424/204.1; 424/199.1; 514/44 A; 435/5

(57) ABSTRACT

The invention relates to methods and related products for preventing and treating disease, based on the use of plant viral vaccines and plant viral defense strategies. The methods also involve the identification of appropriate therapeutic strategies for diseases such as cancers.

### RELATED APPLICATIONS

[0001] This application claims priority under 35 U.S.C. §119(e) to U.S. Provisional Application Ser. No. 61/537,306, entitled “PLANT VIRAL VACCINES AND THERAPEUTICS” filed on Sep. 21, 2011, which is herein incorporated by reference in its entirety.

### BACKGROUND OF INVENTION

[0002] Mammalian viruses have recently been shown to play a critical role in the development of certain types of tumors in animals or humans. At least six families of viruses appear to be involved in tumor development. These include five families of viruses having DNA genomes, which are referred to as DNA tumor viruses and a single family of tumor viruses referred to as retroviruses. Retroviruses have viral particles with RNA genomes and replicate through the synthesis of a DNA provirus in infected cells. Known tumor causing viruses include Hepatitis B virus (HBV, Liver Cancer), Human Papilloma virus (HPV, cervical and other anogenital cancers), Epstein-barr virus (EBV, Burkitt's Lymphoma and Nasopharyngeal carcinoma), Kaposi's sarcoma-associated herpes virus (Kaposi's sarcoma), Human T-cell Lymphotropic virus (adult T-cell leukemia), and Human Immunodeficiency virus (HIV, aids associated cancers).

[0003] Although these viruses have each been linked with cancer it is believed that the tumor viruses work through distinct mechanisms. For instance, HBV is believed to cause chronic tissue damage in the liver which drives the continual proliferation of liver cells resulting in a tumor. SV40 and Polyoma virus are believed to produce factors during lytic infection which stimulate host cell gene expression and DNA synthesis. Since most animal cells are non-proliferating they must be stimulated to divide in order to induce the enzymes needed for viral DNA replication. Cell proliferation stimulated in this way can lead to transformation if the viral DNA becomes stably integrated. One common feature of tumor-causing viruses is that these viruses cause changes to the cells by integrating their genetic material within the host cell DNA. DNA viruses can directly insert the DNA into the host DNA. RNA viruses, however, must first transcribe RNA to DNA and then insert the genetic material into the host cell.

[0004] Human papilloma virus (HPV) has been implicated in many tumors. HPV infections often persist for extended periods of time and persistent infections with HPVs have been demonstrated to be the primary cause of cervical cancer. The discovery of HPV as an etiologic agent of many human tumors provided the rationale for the development of a vaccine, now sold as either Gardasil® or Cervarix®, both of which have been reported to prevent cervical and potentially other tumors, such as anal cell carcinoma and genital warts. Gardasil®, sold by Merck, is a prophylactic vaccine designed to avoid the development of cervical and other cancers. Gardasil® does not treat existing infections and must be given prior to HPV infection in order to be effective. Gardasil® is typically provided in three 0.5 ml injections over six months. The second injection is two months after the first and the third injection is four months after the second. Gardasil® is composed of recombinant viral like particles (VLPs) assembled from the L1 proteins of HPV. It has been shown that genes encoding the L1 protein in recombinant form are capable of assembling into HPV VLPs when expressed that are morphologically similar to native HPV virions.

[0005] A review article on HPV and therapeutic vaccines (Mo et al. Current cancer therapy reviews, 2010, 6, 81-103), notes that HPV, a non-enveloped double-stranded circular DNA virus, may integrate viral DNA into the host genome.

### SUMMARY OF INVENTION

[0006] It has been discovered that plant viruses play an important role in the development of human disease. The invention, in some aspects, is directed to novel prophylactic and therapeutic modalities for treating human disease and related products based on the targeting of plant viruses.

[0007] In some aspects the invention is directed to a vaccine of an isolated plant viral antigen, wherein the plant viral antigen is immunogenic, and a pharmaceutically acceptable carrier. In some embodiments the plant viral antigen is an immunogenic peptide. Optionally, the vaccine may include an adjuvant.

[0008] In other embodiments the plant viral antigen is a nucleic acid comprising at least one gene encoding a plant viral peptide. The vaccine may be a replication defective vector comprising the nucleic acid, which optionally may be an adenoviral vector. In some embodiments the gene is operably linked to a heterologous promoter and transcription terminator.

[0009] The plant viral antigen, in some embodiments, is a plant virus selected from the group consisting of Maize chlorotic mottle virus; Maize rayado fino virus; Oat chlorotic stunt virus; Chayote mosaic tymovirus; Grapevine asteroid mosaic-associated virus; Grapevine fleck virus; Grapevine Red Globe virus; Grapevine rupestris vein feathering virus; Melon necrotic spot virus; Physalis mottle tymovirus; Prunus necrotic ringspot; Nigerian tobacco latent virus; Tobacco mild green mosaic virus; Tobacco mosaic virus; Tobacco necrosis virus; Eggplant mosaic virus; Kennedya yellow mosaic virus; Lycopersicon esculentum TVM viroid; Oat blue dwarf virus; Obuda pepper virus; Olive latent virus 1; Paprika mild mottle virus; PMMV; Tomato mosaic virus; Turnip vein-clearing virus; Carnation mottle virus; Cocksfoot mottle virus; Galinsoga mosaic virus; Johnsongrass chlorotic stripe mosaic virus; Odontoglossum ringspot virus; Ononis yellow mosaic virus; Panicum mosaic virus; Poinsettia mosaic virus; Pothos latent virus; Banana bunchy top virus, and Ribgrass mosaic virus.

[0010] In other aspects the invention is a method of modulating gastrointestinal plant viral levels in a subject, by administering to the subject an amount of a plant virus vaccine effective to modulate the plant virus levels in the gastrointestinal tract of the subject. In some embodiments the levels of plant virus in the gastrointestinal system of the subject corresponding to the plant virus vaccine are decreased in the gastrointestinal system of the subject relative to the levels that are observed in the absence of the administration of the plant virus vaccine. In other embodiments the levels of plant virus in the gastrointestinal system of the subject are measured in a fecal sample or a blood sample.

[0011] Methods involving administering to a subject at risk of having a plant virus associated cancer, a plant virus vaccine in an effective amount to inhibit infection with the plant virus in the subject are provided according to other aspects of the invention. In some embodiments the subject has been exposed to a plant virus.

[0012] The invention also relates to a method for treating a subject, wherein the subject has a disease associated with a plant virus, with an anti-viral compound in an effective amount to reduce infection with the plant virus in the subject.

[0013] In other aspects of the invention a method is provided. The method comprises determining whether a subject having a virally caused disease has been exposed to a plant virus that causes the disease, and treating the subject with a compound that is a plant defense mechanism against the plant virus in an effective amount to reduce infection of the subject with the plant virus. The disease may optionally be cancer. The method may also include the step of administering a TLR agonist.

[0014] In other embodiments the step of determining whether the subject has been exposed to the plant virus involves analyzing a biological sample of the subject for the presence of the plant virus. The biological sample may be, for instance, a fecal or blood sample.

[0015] In some embodiments the compound is a naturally occurring substance found in a plant susceptible to the plant virus or is an analog, homolog, or derivative thereof. In other embodiments the compound is a plant defense mechanism against the plant virus selected from the group consisting of flavonoids, anthocyanins, phytoalexins, medicarpin, rishitin, camalexin, capsaisin, glucosinolate, defensins, alpha-amylase, protease inhibitors, lignin and furanocoumarins.

[0016] According to yet other aspects, the invention involves a method for silencing plant virus gene expression in a mammal needing relief from the gene expression. The method involves administering to the mammal an inhibitory nucleic acid that targets the genome of an essential plant virus in an effective amount to reduce infection of the mammal with the plant virus.

[0017] In some embodiments the inhibitory nucleic acid comprises double stranded nucleic acid of 15 to 30 nucleotides in length. The double stranded nucleic acid may have a first nucleotide sequence that targets the genome of the essential plant virus and a second nucleotide sequence that is a complement of the first nucleotide sequence.

[0018] The inhibitory nucleic acid in some embodiments comprises a nucleotide sequence having sufficient complementarity to a target sequence of about 15 to about 30 contiguous nucleotides in an RNA of a virus for the inhibitory nucleic acid to direct cleavage of the RNA via RNA interference. The virus may be selected from the group consisting of Maize chlorotic mottle virus; Maize rayado fino virus; Oat chlorotic stunt virus; Chayote mosaic tymovirus; Grapevine asteroid mosaic-associated virus; Grapevine fleck virus; Grapevine Red Globe virus; Grapevine rupestris vein feathering virus; Melon necrotic spot virus; Physalis mottle tymovirus; Prunus necrotic ringspot; Nigerian tobacco latent virus; Tobacco mild green mosaic virus; Tobacco mosaic virus; Tobacco necrosis virus; Eggplant mosaic virus; Kennedya yellow mosaic virus; Lycopersicon esculentum TVM viroid; Oat blue dwarf virus; Obuda pepper virus; Olive latent virus 1; Paprika mild mottle virus; PMMV; Tomato mosaic virus; Turnip vein-clearing virus; Carnation mottle virus; Cocksfoot mottle virus; Galinsoga mosaic virus; Johnsongrass chlorotic stripe mosaic virus; Odontoglossum ringspot virus; Ononis yellow mosaic virus; Panicum mosaic virus; Poinsettia mosaic virus; Pothos latent virus; and Ribgrass mosaic virus, wherein the target sequence is in a gene essential for infectivity or replication of the virus. In some embodiments the gene essential for infectivity or replication of the virus is selected from a group consisting of plant virus genome-linked protein (VPg), VPg-Pro, the 3′UTR, the 5′ UTR, zinc finger region of the capsid protein, and tRNA like domain.

[0019] A vector composition comprising a nucleic acid encoding an inhibitory nucleic acid that targets the genome of an essential plant virus operably linked to a mammalian promoter is provided according to other aspects of the invention.

[0020] A method is also provided for performing a physical analytical step on a biological sample of a subject, identifying the presence of plant virus in the biological sample based on the physical analytical step, and determining a course of treatment for the subject based on the presence of the plant virus. In some embodiments the presence of the plant virus is indicative of a predisposition to cancer. In other embodiments the biological sample is a fecal sample. In yet other embodiments the plant virus is tobacco mosaic virus, Maize chlorotic mottle virus; Maize rayado fino virus; Oat chlorotic stunt virus; Chayote mosaic tymovirus; Grapevine asteroid mosaic-associated virus; Grapevine fleck virus; Grapevine Red Globe virus; Grapevine rupestris vein feathering virus; Melon necrotic spot virus; Physalis mottle tymovirus; Prunus necrotic ringspot; Nigerian tobacco latent virus; Tobacco mild green mosaic virus; Tobacco necrosis virus; Eggplant mosaic virus; a yellow mosaic virus; Lycopersicon esculentum TVM viroid; Oat blue dwarf virus; Obuda pepper virus; Olive latent virus 1; Paprika mild mottle virus; PMMV; Tomato mosaic virus; Turnip vein-clearing virus; Carnation mottle virus; Cocksfoot mottle virus; Galinsoga mosaic virus; Johnsongrass chlorotic stripe mosaic virus; Odontoglossum ringspot virus; Ononis yellow mosaic virus; Panicum mosaic virus; Poinsettia mosaic virus; Pothos latent virus; or Ribgrass mosaic virus.

[0021] The method may also involve analyzing the status of inflammation in the subject.

[0022] The course of treatment in the method may be the administration of a plant virus vaccine.

[0023] According to other aspects of the invention, a method for treating a plant virus associated cancer is provided. The method involves administering to a subject having a plant virus associated cancer an inhibitor of plant specific RNA dependent RNA polymerase in an effective amount to treat the cancer.

[0024] In some embodiments the inhibitor is an RNA dependent RNA polymerase antagonist. The RNA dependent RNA polymerase antagonist may be an inhibitory peptide, such as an antibody. In other embodiments the RNA dependent RNA polymerase antagonist is an inhibitory nucleic acid such as siRNA, shRNA, or miRNA.

[0025] A method for identifying an anti-cancer agent is provided according to other aspects of the invention. The method involves performing a physical analytical step on a plant to determine a plant defense mechanism for preventing infection with a plant virus, identifying an association of the plant virus with a mammalian cancer, and selecting the plant defense mechanism as an anti-cancer agent for the mammalian cancer.

[0026] A kit including a set of primers for detecting plant viruses, a reagent for processing the primers to detect plant viruses, and instructions for analyzing a human or animal biological sample to detect the presence of plant viruses using the set of primers and reagent is provided in other aspects of the invention.

[0027] A method for determining the presence of a plant virus in a human gut capable of inducing a virally caused disease is provided according to yet another aspect of the invention. The method involves conducting an analytic test for such plant virus in the blood or fecal matter of the human using a set of first reagents for detecting plant viruses, and using a second reagent for processing the first reagents to detect plant viruses. In some embodiments the set of first reagents comprises a set of antibodies against a plurality of said plant viruses.

[0028] According to other aspects of the invention, a method for treating HIV is provided. The method involves administering to a subject having or at risk of having HIV a plant viral vaccine in an effective amount to treat or prevent HIV infection in the subject. In some embodiments the plant viral vaccine is banana bunchy virus.

[0029] In other aspects, a composition for modulating gastrointestinal plant viral levels in a subject is provided. The composition is formulated in amount sufficient for administering to the subject an amount of a plant virus vaccine effective to modulate the plant virus levels in the gastrointestinal tract of the subject, wherein the plant virus vaccine is optionally a vaccine as described herein.

[0030] In other aspects a composition of a plant virus vaccine in an effective amount to inhibit infection with the plant virus in a subject at risk of having a plant virus associated cancer is provided.

[0031] A composition comprising an anti-viral compound for use in the treatment of a subject having a disease associated with a plant virus is provided according to other aspects of the invention.

[0032] A composition comprising a compound that is a plant defense mechanism against a plant virus for use in the treatment of a subject who has been identified as having a virally caused disease, such as cancer, and has been exposed to the plant virus that causes the disease.

[0033] A composition comprising an inhibitory nucleic acid that targets the genome of an essential plant virus for use in silencing plant virus gene expression in a mammal needing relief from the gene expression and in an effective amount to reduce infection of the mammal with the plant virus.

[0034] A composition comprising an anti-viral compound for use in the treatment of a subject having a plant virus associated cancer, wherein the anti-viral compound is a compound that interferes with viral synthesis.

[0035] This invention is not limited in its application to the details of construction and the arrangement of components set forth in the following description or illustrated in the drawings. The invention is capable of other embodiments and of being practiced or of being carried out in various ways. Each of the above embodiments and aspects may be linked to any other embodiment or aspect. Also, the phraseology and terminology used herein is for the purpose of description and should not be regarded as limiting. The use of “including,” “comprising,” or “having,” “containing,” “involving,” and variations thereof herein, is meant to encompass the items listed thereafter and equivalents thereof as well as additional items.

### BRIEF DESCRIPTION OF DRAWINGS

[0036] The accompanying drawings are not intended to be drawn to scale. In the drawings, each identical or nearly identical component that is illustrated in various figures is represented by a like numeral. For purposes of clarity, not every component may be labeled in every drawing. In the drawings:

[0037] FIG. 1 is a blot of a genomic DNA PCR analysis. Gnomic DNA from T-24 human bladder cancer cell line was amplified using 4 primer sets specific for amplifying tobacco mosaic virus (TMV). Lane 1. 1/1000 BP size markers. Lane 2. Genomic DNA amplified with TMV primer 1. Lane 3. Genomic DNA amplified with TMV primer 3. Lane 4. Genomic DNA amplified with TMV primer 6. Lane 5. Genomic DNA amplified with TMV primer 8. Foreword and reverse primer sequences can be found in Example 1.

[0038] FIG. 2 is a data set depicting the effect of antiviral treatment on T-24 human bladder cancer cells. FIG. 2a is a set of dot plots of flow cytometric data. Forward scatter on the Y-axis vs side scatter on the X-axis. Data shows increased death in T-24 human bladder cancer cells treated with anti-viral agent efavirenz, a nonnucleoside reverse transcriptase inhibitor. FIG. 2b is a bar graph showing increased cell death after treatment with efavirenz. Cell death was measured by flow cytometry.

[0039] FIG. 3 demonstrates that TLR activation results in transcription of the integrated viral genes in several human bladder cancer cells. FIG. 3 is a series of bar graphs depicting the results of the PCR assays using primers 1-8, under the following cellular conditions: 3a is CpG treated spleen cells, 3b is untreated T24 cells, 3c is CpG treated T24 cells; 3d is LPS treated T24 cells, 3e is CpG+efavirenz treated T24, and 3f is LPS+efavirenz treated T24.

[0040] FIG. 4 is a ClustalX 2.1 sequence alignment of plant virus protein sequences versus viral anti-apoptotic protein sequences.

[0041] FIG. 5 is a ClustalX 2.1 sequence alignment of Plant Virus Protein Sequences vs. Human Proteins from Cell Death Pathways. FIG. 5A depicts amino acids 1051-1200. FIG. 5B depicts amino acids 1201-1350.

[0042] FIG. 6 is a ClustalX 2.1 sequence alignment of HIV versus Banana Bunchy Top Virus (BBTV).

### DETAILED DESCRIPTION

[0043] A group of researchers recently analyzed the enteric RNA viral community present in healthy humans (Zhang et al. PLOS Biology, January 2006, v. 4, p. 108) and discovered that the majority of the viral sequences present in human fecal samples were similar to plant RNA viruses. Upon further analysis of the viruses taken from these samples, it was discovered that these viruses were active and still capable of infecting plants. Traditionally plant viruses were believed to be harmless in humans. Although plant viruses have long been, and are currently, considered non-pathogenic for animals, our discoveries (that lead to the invention) prompt us to consider that plant viruses may infect animal cells and that they may be causally related to human disease.

[0044] It has now been discovered that these active viruses present in many human subjects, which were previously thought to be harmless, play critical roles in the development of disease. A number of diseases, including tumors, in humans and animals are associated with plant virus infection. The ability to prevent plant viral infection and/or to treat plant viral infection has profound implications for the treatment of a wide array of diseases. As such, the invention relates to preventative and therapeutic vaccines which are specific for plant viruses as well as compounds that are effective in reducing or eliminating the activity of plant viruses, in order to treat diseases in which plant viruses play a role. The invention also encompasses diagnostic, prognostic and drug discovery based methods.

[0045] Plant viruses are structurally similar to mammalian viruses in many respects. Two families of plant viruses are characterized as single-stranded DNA viruses, both having small circular genome components. A single family of plant viruses is categorized as a reverse-transcribing virus, having a single circular double-stranded DNA structure. The replication of the reverse-transcribing virus is through an RNA intermediate. Several plant viruses and many mycoviruses are characterized as double-stranded RNA viruses. A few plant viruses are negative sense single-stranded RNA. They are characterized as such because some or all of their genes are translated into a protein from an RNA strand complementary to that of the genome. Finally, the majority of plant viruses are positive sense single-stranded RNA. Some viruses use host reverse transcriptase or that from co-infectious agents.

[0046] Many of the plant viruses reported to be present in the gut or nasal passages are RNA viruses whose genomes encode RNA dependent RNA polymerase that can bind to “permissive” factors or proteins that make a host, a plant or even a mammalian cell, permissive for plant virus infection. In a recent study, investigators reported that Pepper Mild Mottled Virus (PMMV) can infect mammalian cells and the report suggested for the first time that mammalian cells may be hosts to plant (Colson et al. POLF1, v. 5, April 2010, p. 1).

[0047] The data presented in the Examples is the first demonstration of a direct link between a plant virus and a mammalian disease, such as cancer. It was discovered that viral DNA from tobacco mosaic virus is stably incorporated into genomic DNA from human bladder cancer. The development of bladder cancer is strongly linked to exposure to smokeless tobacco. The discovery that tobacco mosaic virus is stably incorporated into genomic DNA from human bladder cancer strongly supports the assertion that the virus creates a susceptibility to the development of cancer, similar to the role played by papilloma virus in cervical cancer. Additionally, human bladder cancer cells treated with a plant anti-viral agent showed significantly less proliferation than control (untreated or methanol treated) cells. The data indicate that plant viruses play a role in cancer such as bladder cancer and that treatment of the viral infection can reduce cellular proliferation and, thus, such compounds are useful therapeutics. Additionally, after the priority date of the instant application Li et al (Biosci. Rep. 32, p. 174, 2012) published a study demonstrating that TMV induces autophagy in HeLa cells, confirming Applicant's work.

[0048] Although Applicant is not bound by mechanism of action it is believed that the plant virus contributes to mammalian disease by integrating plant viral DNA into the host genome in an oncogenic manner or transcriptionally silent manner or alternatively by remaining independent of the host DNA by altering the function of the host cells by utilizing a mechanism which is similar to RNA interference and can regulate host gene expression. When the viral DNA is integrated in an oncogenic manner it may be integrated into the chromosome near an oncogene or in another site that would cause it to be expressed in a dysregulated fashion. The dysregulated expression of the viral DNA causes increased expression, leading to the proliferation of the host cell. Plant viral DNA that is incorporated in transcriptionally silent manner may also result in the development of cancer or other disease when the host cell is exposed to a trigger event. Once the plant viral DNA is silently integrated into the genome it may lay dormant for a period of time, and later be reactivated under conditions of stress, such as inflammation or TLR activation. The reactivation in response to conditions of stress can activate new gene transcription from the integrated viral DNA sequences, resulting in cellular proliferation. Thus, TLR agonists can be administered together with the vaccines or other therapeutics of the invention in order to activate viral transcription, to enhance the therapy.

[0049] “Plant viruses” as used herein refers to a group of viruses that have been identified as being pathogenic to plants. These viruses rely on the host for replication, as they lack the molecular machinery to replicate without the host. Plant viruses include but are not limited to tobacco mosaic virus, Maize chlorotic mottle virus; Maize rayado fino virus; Oat chlorotic stunt virus; Chayote mosaic tymovirus; Grapevine asteroid mosaic-associated virus; Grapevine fleck virus; Grapevine Red Globe virus; Grapevine rupestris vein feathering virus; Melon necrotic spot virus; Physalis mottle tymovirus; Prunus necrotic ringspot; Nigerian tobacco latent virus; Tobacco mild green mosaic virus; Tobacco necrosis virus; Eggplant mosaic virus; Kennedya yellow mosaic virus; Lycopersicon esculentum TVM viroid; Oat blue dwarf virus; Obuda pepper virus; Olive latent virus 1; Paprika mild mottle virus; PMMV; Tomato mosaic virus; Turnip vein-clearing virus; Carnation mottle virus; Cocksfoot mottle virus; Galinsoga mosaic virus; Johnsongrass chlorotic stripe mosaic virus; Odontoglossum ringspot virus; Ononis yellow mosaic virus; Panicum mosaic virus; Poinsettia mosaic virus; Pothos latent virus; or Ribgrass mosaic virus. An extensive listing of plant viruses, which can be treated or prevented according to the invention, is set forth in Brunt, A. A. et al (eds.) (1996), Plant Viruses Online Descriptions and Lists from the VIDE Database. Version: 20 Aug. 1996 (URL:http://biology.anu.edu.au/Groups/MES/vide/) and Dallwitz (1980) and Dallwitz, Paine and Zurcher (1993). These viruses include all of those listed on Appendix A of U.S. Patent Application Ser. No. 61/537,306, to which the instant application claims priority and which is specifically incorporated by reference and in Brunt, A. A. et al (eds.) (1996), Plant Viruses Online: Descriptions and Lists from the VIDE Database. Version: 20 Aug. 1996 (URL:http://biology.anu.edu.au/Groups/MES/vide/) and Dallwitz (1980) and Dallwitz, Paine and Zurcher (1993). Exemplary plant viruses and the plants they infect are presented below in Table 1.

TABLE 1

| Virus | Plant | Type of Host Plant |
|---|---|---|
| Maize chlorotic mottle virus | Zea mays | Corn |
| Maize rayado fino virus | Zea mays | Corn |
| Oat chlorotic stunt virus | Avena sativa | Oat |
| Chayote mosaic tymovirus | Sechium edule | Chayote or vegetable pear |
| Grapevine asteroid mosaic- | Vitis rupetris | Grape |
| associated virus | | |
| Grapevine fleck virus | Vitis vinifera | Grape |
| Grapevine Red Globe virus | Vitis rupestris | Grape |
| Grapevine rupestris vein feathering | Vitis rupestris | Grape |
| virus | | |
| Melon necrotic spot virus | Cucumis melo, C. sativus | Melon and cucumber |
| Physalis mottle tymovirus | Solanaceous plants | Datura (Jimson weed), |
| | | Mandragora (mandrake), |
| | | belladonna (deadly nightshade), |
| | | Lycium barbarum (Wolfberry), |
| | | Physalis philadelphica |
| | | (Tomatillo), Physalis peruviana |
| | | (Cape gooseberry flower), |
| | | Capsicum (paprika, chili pepper), |
| | | Solanum (potato, tomato, |
| | | eggplant), Nicotiana (tobacco), |
| | | and Petunia. With the exception |
| | | of tobacco (Nicotianoideae) and |
| | | petunia (Petunioideae) |
| Prunus necrotic ringspot | Dicotyledonous plants | Fruit |
| Nigerian tobacco latent virus | Nigerian tobacco | Tobacco |
| Tobacco mild green mosaic virus | Nicotiana glauca, N. tabacum, | Tobacco |
| | Capsicum annum, Eryngium | |
| | aquaticum | |
| Tobacco mosaic virus | Nicotiana tobacum, | Tobacco |
| | Chenopodium quinoa, N. | |
| | glutinosa | |
| Tobacco necrosis virus | Nicotiana tabacum, | Tobacco |
| | Chenopodium amaranticolor, | |
| | Cucumis sativus, N. clevelandii | |
| Eggplant mosaic virus | Chenopodium amaranticolor, C. | Vegetable |
| | quinoa, Cucumis sativus, | |
| | Nicotiana clevelandii, N. | |
| | glutinosa, eggplant, and tomato | |
| Kennedya yellow mosaic virus | Kennedya rubicunda, | Vegetable |
| | Desmodium triflorum, D. | |
| | scorpiurus, Indigofera australis, | |
| | red Kennedy pea, dusky coral | |
| | pea, mung bean, French bean, pea | |
| Lycopersicon esculentum TVM | Lycopersicon esculentum | Vegetable |
| viroid | | |
| Oat blue dwarf virus | Avena sativa, Hordeum vulgare, | Vegetable |
| | Linum usitatissimum | |
| Obuda pepper virus | Nicotiano glutinosa, | Vegetable |
| | Chenopodium amaranticolor, N. | |
| | tabacum, and pepper | |
| Olive latent virus 1 | Oleo europaea | Vegetable |
| Paprika mild mottle virus | Capsicum annuum, Nicotiana | Vegetable |
| | benthamiana, N. clevelandii | |
| PMMV | Capsicum frutescens, C. annuum | Vegetable |
| Tomato mosaic virus | Lycopersicon esculentum | Vegetable |
| Turnip vein-clearing virus | Crucifers | Vegetable |
| Carnation mottle virus | Dianthaus caryophyllus | Others |
| Cocksfoot mottle virus | Avena sativa, Dactylis glomerata, | Others |
| | Hordeium vulgare, Triticum | |
| | aestivum, cocksfoot, and wheat | |
| Galinsoga mosaic virus | Galinsoga parviflora | Others |
| Johnsongrass chlorotic stripe | Sorghum halepense | Others |
| mosaic virus | | |
| Odontoglossum ringspot virus | Chenopodium quinoa (L), | Others |
| | Nicotiana tabacum cv. Xanthi-nc | |
| | (L) | |
| Ononis yellow mosaic virus | Ononis repens | Others |
| Panicum mosaic virus | Panicum vigatum | Others |
| Poinsettia mosaic virus | Euphorbia pulcherrima, E. | Others |
| | fulgens, Nicotiana benthamiana, | |
| | E. cyathophora | |
| Pothos latent virus | Nicotiana clevelandii, N. | Others |
| | benthamiana, N. hispens | |
| Ribgrass mosaic virus | Plantago lanceolata | Others |

[0050] The invention relates to the use of novel vaccines to prevent plant viruses from transforming mammalian host cells into cancerous lesions. Additionally, by following the mechanisms of effective plant host defenses, therapeutic modalities for the plant virus-induced tumors may be derived from an understanding of known plant host-defense mechanisms that have evolved to protect the plant from the plant virus. Further stress conditions such as inflammation or TLR activation that would lead to increase viral replication may be monitored and treated in patients that have been exposed to plant viruses.

[0051] The methods are useful for treating disease in a subject. As used herein, a subject is a mammal such as a human, non-human primate, cow, horse, pig, sheep, goat, dog, cat, or rodent. In all embodiments human subjects are preferred. A disease treatable according to the methods of the invention is any disease in which a plant virus plays a role in the development, maintenance or advancement of the disease. Such diseases are referred to as disease associated with a plant virus and include, for instance proliferative disorders, such as cancer, and neurodegenerative diseases. A disease associated with a plant virus is not a disease known to be associated with a mammalian virus, such as, for instance, HIV or HBV infection.

[0052] It was discovered according to the invention that Tobacco Mosaic Virus (TMV) is present in human bladder cancer cells. Inhibition of the virus using an anti-viral agent resulted in a reduction in proliferation of the infected cancer cells. As a result TMV is implicated in the development and progression of human bladder cancer. In addition to bladder cancer, several serious cancers are linked to the use of tobacco, including cancers of the lung, esophagus, larynx (voice box), mouth, throat, kidney, bladder, pancreas, stomach, and cervix, as well as acute myeloid leukemia. Even smokeless tobacco, including snuff and chewing tobacco, increase the risks of oral, facial, and bladder cancer. Furthermore, tobacco field workers have a significantly higher incidence of bladder and other cancers. Bladder cancers have very distinct morphological appearances and individual tumors appear as “tree-like” growths along the bladder wall.

[0053] The incidence of different types of cancer vary based on geographical areas, as do different plant viruses that infect food ingested by humans. For instance, the incidence of stomach cancer is highest in Asia and South America and the incidence of cervical cancer is highest in Latin America, Africa, India and Australia. Cancers with the highest incidence in the more developed countries such as North America and Europe include breast cancer and prostate cancer. Gastrointestinal cancers are highest in Japan and Southeast Asia. In India, the leading cancer, oral maxillo-facial tumors, are significantly linked to chewing leaves of the Betel plant that is frequently infected with the plant virus, badnavirus. These differences may reflect the impact of lifestyle or foods. Importantly, food groups that are ingested in regional areas include plants that are well documented to be infected with plant viruses. Thus, plant viruses are a significant etiologic factor in the majority of cancers, including but not limited to Tobacco Mosaic Virus with bladder and other tobacco-associated tumors; Rice Virus with stomach and gastro-intestinal tumors; Pepper viruses with other regional stomach tumors, etc. One class of virus, found in food, spice and medicine, that is extensively used by humans is Solanaceae. It is believed that the presence of the Cauliflower mosaic virus is associated with gastrointestinal, colon, and head and neck cancers.

[0054] The invention involves in some aspects methods of modulating gastrointestinal plant viral levels in a subject by administering to the subject a plant virus vaccine. The level of plant virus in the gastrointestinal tract of a subject can be determined using a number of known techniques in the art. For instance, Zhang et al 2006, supra, describes methods for determining levels of plant virus in human gastrointestinal tracts. Plant virus levels van be determined in human fecal or blood samples, for instance. Exemplary assays are provided below.

[0055] The levels of plant virus in the gastrointestinal system may be compared to a control. For instance, the levels may be compared to standard known levels or ranges of levels for normal or diseased subjects. Alternatively, the levels may be compared in the same or different subjects before and/or after vaccine administration. In other embodiments the levels may be compared to prior levels measured in the same subject to assess changes over time.

[0056] Additionally, it has been discovered that a plant virus vaccine and other anti-viral therapeutics described herein can be used to treat a subject at risk of having a plant virus associated cancer. A subject at risk of having a plant virus associated cancer as used herein is a subject who is at risk of coming into contact with a plant virus associated with a disease. The subject could come into contact with the plant virus by being exposed to a plant, by residing in or traveling to a geographical region associated with a particular plant, by being in a particular age group that might be exposed to a plant or any other factor determined to be a risk factor for exposure to a plant associated with a virus. In some embodiments the subject has been exposed to a plant virus.

[0057] The plant virus vaccine and other anti-viral therapeutics described herein can also be used to treat a subject having a plant virus associated neurodegenerative disease. A subject having a plant virus associated neurodegenerative disease as used herein is a subject who is at risk of or who has come into contact with a plant virus associated with a neurodegenerative disease. Plant virus associated with a neurodegenerative diseases include for instance amytrophic lateral sclerosis (ALS) and Parkinson's disease. A link between consumption of the plant Cycas micronesica, for example by the people of Guam, and the development of ALS/Parkinsonism Demensia Complex has been established (Shen, W. et al, Ann Neurol, 2010; 68, p. 70-80.) Others have proposed an epidemiologic connection between consumption of castor bean plants, which may be infected with viruses such as Olive latent virus 2, and ALS.

[0058] In some aspects the invention is directed to a vaccine that is composed of an isolated plant viral antigen. A plant viral “antigen” or “immunogen” as used herein refers to a non-infectious plant virus or immunogenic portion, fragment or derivative thereof. The antigen may be a nucleic acid antigen and/or a peptide antigen and optionally may include lipids, such as those found in viral lipid envelopes. For instance an antigen or immunogen may comprise a viral like particle (VLP), whole organism, killed, attenuated or live; a subunit or portion of an organism; a recombinant vector containing an insert with immunogenic properties; a piece or fragment of DNA capable of inducing an immune response upon presentation to a host animal; a protein, a glycoprotein, a lipoprotein, a polypeptide, a peptide, an epitope, a hapten, or any combination thereof.

[0059] The plant viral antigen is immunogenic. The term “immunogenic” as used herein refers to the specific biological immune response to a substance i.e. antigen or immunogen in a host animal. An immunogenic peptide is a viral peptide that elicits an immune response specific for the virus or viruses. Immunogenic peptides of viruses are well known in the art. Exemplary plant viral peptides are shown in Example 5. These peptides include but are not limited to SEQ ID NOs 1-429. The immunogenic peptides in some embodiments are the peptides of Example 5, immunogenic variants or fragments thereof.

[0060] In some instances the antigen, and thus the vaccine, is composed of attenuated virus. The virus, may be, for instance, heat killed intact virus.

[0061] The TMV peptides presented in Example 5 are those identified by Moudallal et al, A major part of the polypeptide chain of tobacco mosaic virus protein is antigenic, EMBO J. 1985 May; 4(5): 1231-1235. Moudallal et al, identified a number of conformation-dependent epitopes in the viral protein. In their assays Moudallal et al, concluded that “virtually the entire sequence of TMVP possessed antigenic activity.”

[0062] The plant viral antigen may also be a nucleic acid of at least one gene encoding a plant viral peptide. Examples of nucleic acids encoding plant viruses and plant virus genes are set forth in Example 6. These nucleic acid sequences include but are not limited to SEQ ID NOS: 430-438, as well as fragments and functional variants thereof.

[0063] In order to effect expression of the gene the nucleic acid may be delivered in a vector and/or operably linked to a heterologous promoter and transcription terminator. As used herein, a “vector” may be any of a number of nucleic acid molecules into which a desired sequence may be inserted by restriction and ligation for transport between different genetic environments or for expression in a host cell. Vectors are typically composed of DNA although RNA vectors are also available. Vectors include, but are not limited to, plasmids, phagemids, and virus genomes.

[0064] A cloning vector is one which is able to replicate in a host cell, and which is further characterized by one or more endonuclease restriction sites at which the vector may be cut in a determinable fashion and into which a desired DNA sequence may be ligated such that the new recombinant vector retains its ability to replicate in the host cell. An expression vector is one into which a desired DNA sequence may be inserted by restriction and ligation such that it is operably joined to regulatory sequences and may be expressed as an RNA transcript.

[0065] As used herein, a coding sequence and regulatory sequences are said to be “operably joined” when they are covalently linked in such a way as to place the expression or transcription of the coding sequence under the influence or control of the regulatory sequences. As used herein, “operably joined” and “operably linked” are used interchangeably and should be construed to have the same meaning. If it is desired that the coding sequences be translated into a functional protein, two DNA sequences are said to be operably joined if induction of a promoter in the 5′ regulatory sequences results in the transcription of the coding sequence and if the nature of the linkage between the two DNA sequences does not (1) result in the introduction of a frame-shift mutation, (2) interfere with the ability of the promoter region to direct the transcription of the coding sequences, or (3) interfere with the ability of the corresponding RNA transcript to be translated into a protein. Thus, a promoter region is operably joined to a coding sequence if the promoter region is capable of effecting transcription of that DNA sequence such that the resulting transcript can be translated into the desired protein or polypeptide.

[0066] The precise nature of the regulatory sequences needed for gene expression may vary between species or cell types, but shall in general include, as necessary, 5′ non-transcribed and 5′ non-translated sequences involved with the initiation of transcription and translation respectively, such as a TATA box, capping sequence, CAAT sequence, and the like. Often, such 5′ non-transcribed regulatory sequences will include a promoter region which includes a promoter sequence for transcriptional control of the operably joined gene. Regulatory sequences may also include enhancer sequences or upstream activator sequences as desired. The vectors of the invention may optionally include 5′ leader or signal sequences. The choice and design of an appropriate vector is within the ability and discretion of one of ordinary skill in the art.

[0067] The vector may be a replication defective vector. These types of vectors include but are not limited to adenoviral vectors.

[0068] The antigen in the vaccine may be an antigenic determinant. An “antigenic determinant” or “epitope” as used herein refers to a portion of an antigen that contacts a particular antibody. When a protein or fragment of a protein is used to immunize a host animal, numerous regions of the protein may induce the production of antibodies that bind specifically to a given region or three-dimensional structure on the protein; these regions or structures are referred to as antigenic determinants.

[0069] As used herein, the term “vaccine composition” includes at least one immunogenic antigen or immunogen in a pharmaceutically acceptable carrier useful for inducing an immune response in a host. Vaccine compositions can be administered in dosages and by techniques well known to those skilled in the medical or veterinary arts, taking into consideration such factors as the age, sex, weight, species and condition of the recipient animal, and the route of administration. As used herein, the term “host cell” refers to any mammalian cell, whether located in vitro or in vivo. For example, host cells may be located in a transgenic animal.

[0070] The vaccine composition may be formulated with or co-administered with an adjuvant. An “adjuvant” as used herein refers to a substance added to a vaccine to increase a vaccine's immunogenicity by stimulating the humoral and/or cellular immune response and/or functioning as a depo. Known vaccine adjuvants include, but are not limited to, oil and water emulsions, oil-in-water emulsions, water-in-oil emulsions, water-in-oil-in-water emulsions, saponin, aluminum hydroxide, dextran sulfate, carbomer, sodium alginate, (N,N-dioctadecyl-N′,N-bis(2-hydroxyethyl)-propanediamine), paraffin oil, muramyl dipeptide, cationic lipids, DMRIE, DOPE, and TLR ligands such as CpG oligonucleotides.

[0071] Before the instant invention, plant viruses were utilized as carriers or drug delivery reagents in vaccines. For instance, the prior art has shown the use of inactivated virus like particles derived from plants as carriers for non-plant based antigens in vaccines. These viral like particles can be loaded with DNA encoding foreign peptides which will produce the antigen of interest or they could be loaded with drugs. Modified plant viruses have also been used as smart bombs to deliver chemical payloads. These modified plant viruses have a viral shell with DNA removed leaving a cargo space of 17 nanometers which can be filled with drugs to deliver to cells. The viral shell may be coated in small proteins called signal peptides, which target the complex to a particular tissue. When administered to a subject the virus presumably travels to the target tissue and injects the payload into the cell. These prior art constructs differ from the plant viral vaccines of the invention in several important ways.

[0072] The vaccines of the invention are designed such that the antigen is part of the plant virus. In other words the vaccine includes components which elicit a specific immune response against a plant virus in the host. In addition to the plant viral antigen, the vaccine can include other foreign antigens in some embodiments, as long as it includes an immunogenic plant virus antigen. In some embodiments the vaccine does not include any nucleic acid and/or protein other than the plant viral nucleic acid and/or protein. Thus in some embodiments the plant viral antigen is an immunogenic nucleic acid or peptide of a plant virus, and is not a plant viral particle having a foreign peptide or nucleic acid incorporated therein.

[0073] Recombinant immunogenic proteins of plant viruses can be assembled into VLPs for use as vaccines. VLPs can be assembled from naturally expressed or recombinantly produced viral proteins. Disulfide bonds, including inter-capsomeric disulfide bonds have been demonstrated to be important for VLPs stability and possibly assembly. Typically, the recombinant proteins can be produced in many different types of host cells. The host cells are transformed with the appropriate genetic constructs and once the proteins are produced, they may be harvested and purified using any known procedures. It is possible that parts of the VLP can be fused to proteins of interest to help increase the immunogenicity of the vaccine.

[0074] The invention also relates to a method for treating a subject, wherein the subject has a disease associated with a plant virus, with an antiviral compound in an effective amount to reduce infection of the subject with the plant virus. An effective amount to reduce infection of the subject with the plant virus refers to an amount of an antiviral compound that increases the resistance of the subject to infection with the virus, in other words, decreases the likelihood that the subject will develop the disease resulting from the virus, as well as reducing the viral levels to treat the disease, maintain the viral levels to prevent the disease from becoming worse, or to slow the progressive infection with the virus compared to in the absence of the therapy.

[0075] An anti-viral compound, as used herein is any compound that inhibits or interferes with viral development, infectivity or replication. A number of anti-viral compounds are known in the art. For instance, anti-viral compounds include but are not limited to, compounds which interfere with cell entry, compounds that interfere with viral synthesis, compounds that interfere with transcription and translation and compounds that inhibit viral assembly.

[0076] Compounds which interfere with cell entry include, for instance, agents which mimic the virus-associated protein (VAP) and bind to the cellular receptors, such as VAP anti-idiotypic antibodies, natural ligands of the receptor and anti-receptor antibodies and agents which mimic the cellular receptor and bind to the VAP, including anti-VAP antibodies, receptor anti-idiotypic antibodies, extraneous receptor and synthetic receptor mimics.

[0077] Compounds that interfere with viral synthesis, include but are not limited to agents that block reverse transcription such as nucleotide or nucleoside analogues and inhibitors of RNA dependent RNA polymerase. Inhibitors of RNA dependent RNA polymerase are particularly interesting plant anti-viral compounds. It has previously been shown that replication of a plant virus and infection of the host cell by the virus resulted from the binding of the plant RNA dependent RNA polymerase to a host factor that allowed infection. Our analysis demonstrates that the plant virus host factor has sequence homology to an analogous factor that may be necessary for lysogenic infection with papilloma viruses. The factor may be associated with release from dead cells or conditions of inflammation in the host.

[0078] Compounds that interfere with transcription and translation include, for instance, agents that block transcription factor binding and inhibitory nucleic acids such as antisense and siRNA.

[0079] Compounds that inhibit viral assembly include protease inhibitors.

[0080] Exemplary anti-viral compounds include but are not limited to Tenofovir

[0081] Disoproxil Fumarate, Abacavir, Emtricitabine, Lamivudine, Zidovudine, Atazanavir Sulfate, Nevirapine, Stavudine, Didanosine, Efavirenz, Lopinavir, Zalcitabine, Entecavir, Apricitabine, Adefovir, Nevirapine, Delavirdine, Etravirine, Rilpivirine, portmanteau inhibitors, and Ritonavir.

[0082] Another anti-viral compound useful according to the invention is melittin and analogs thereof. Such compounds are described in Marcos et al PNAS v. 92, p. 12466, 1995. Melittin is a 26 amino acid amphipathic peptide.

[0083] A recently developed antiviral strategy, also encompassed by anti-viral compounds according to the invention is double-stranded RNA activated caspase oligomerizer (DRACO) methods. DRACO involves the destruction of dsRNA inside infected cells while sending a signal to the cell to begin apoptosis.

[0084] A number of these anti-viral compounds are naturally occurring plant viral defense mechanisms. These are chemicals or other mechanisms developed by plants to avoid infection or treat infection by viruses. Naturally occurring plant viral defense mechanisms include but are not limited to chloroquine, Resistance (R) proteins, salicylic acid, jasmonic acid, inhibitory nucleic acids specific for essential plant genes, such as argonaute (e.g., AGO1, AGO2, flavonoids, anthocyanins, phytoalexins, medicarpin, rishitin, camalexin, capsaisin, glucosinolate, defensins, alpha-amylase, protease inhibitors, lignin and furanocoumarins. Medicinal plants have been described previously. For instance, Mukhtar et al (Virus Research, v. 131, p. 111-120 (2008)) which is incorporated by reference is a review article on medicinal plants having anti-viral activities. Such plants fall within the anti-viral compounds of the invention.

[0085] Anti-viral compounds of the invention also include inhibitory nucleic acids that target the plant virus. Previous studies have shown that administration of siRNA in animal models is useful for preventing infection. These same mechanisms are useful in treating plant viruses that have infected mammalian cells. Preferably, the virus is selected from any of the viruses listed in Appendix A of U.S. Patent Application Ser. No. 61/537,306 which is incorporated by reference or Table 1. A target nucleic acid is any nucleic acid sequence whose expression or activity is to be modulated. The target nucleic acid can be DNA or RNA.

[0086] The inhibitory nucleic acids target nucleic acids that are part of a viral genome and, in particular, nucleic acids comprising essential genes. More specifically, the inhibitory nucleic acid inhibit expression of the target viral sequence. “Essential genes” refer to genes whose expression is required for infection and/or replication functions of the virus. The viral genome may be selected, for example, from the genomes of a virus noted in Appendix A of U.S. Patent Application Ser. No. 61/537,306 and/or Table 1. Essential genes in the genomes of the viruses noted above are known to the skilled artisan. The gene essential for infectivity or replication of the virus may be for instance plant virus genome-linked protein (VPg), VPg-Pro, the 3′UTR, the 5′ UTR, zinc finger region of the capsid protein, or tRNA like domain.

[0087] Thus, the invention also features the use of small nucleic acid molecules, referred to as short interfering nucleic acid (siNA) that include, for example: microRNA (miRNA), short interfering RNA (siRNA), double-stranded RNA (dsRNA), and short hairpin RNA (shRNA) molecules to knockdown expression of viral proteins. An siNA of the invention can be unmodified or chemically-modified. An siNA of the instant invention can be chemically synthesized, expressed from a vector or enzymatically synthesized. The instant invention also features various chemically-modified synthetic siNA molecules capable of modulating gene expression or activity in cells by, for instance, RNA interference (RNAi). The use of chemically-modified siNA improves various properties of native siNA molecules through, for example, increased resistance to nuclease degradation in vivo and/or through improved cellular uptake. Furthermore, siNA having multiple chemical modifications may retain its RNAi activity. The siNA molecules of the instant invention provide useful reagents and methods for a variety of therapeutic applications.

[0088] Chemically synthesizing nucleic acid molecules with modifications (base, sugar and/or phosphate) that prevent their degradation by serum ribonucleases can increase their potency (see e.g., Eckstein et al., International Publication No. WO 92/07065; Perrault et al, 1990 Nature 344, 565; Pieken et al., 1991, Science 253, 314; Usman and Cedergren, 1992, Trends in Biochem. Sci. 17, 334; Usman et al., International Publication No. WO 93/15187; and Rossi et al., International Publication No. WO 91/03162; and Sproat, U.S. Pat. No. 5,334,711; all of these describe various chemical modifications that can be made to the base, phosphate and/or sugar moieties of the nucleic acid molecules herein). Modifications which enhance their efficacy in cells, and removal of bases from nucleic acid molecules to shorten oligonucleotide synthesis times and reduce chemical requirements are desired.

[0089] There are several examples in the art describing sugar, base and phosphate modifications that can be introduced into nucleic acid molecules with significant enhancement in their nuclease stability and efficacy. For example, oligonucleotides are modified to enhance stability and/or enhance biological activity by modification with nuclease resistant groups, for example, 2′ amino, 2′-C-allyl, 2′-fluoro, 2′-O-methyl, 2′-H, nucleotide base modifications (for a review see Usman and Cedergren, 1992, TIBS. 17, 34; Usman et al., 1994, Nucleic Acids Symp. Ser. 31, 163; Burgin et al., 1996, Biochemistry, 35, 14090). Sugar modification of nucleic acid molecules have been extensively described in the art (see Eckstein et al., International Publication PCT No. WO 92/07065; Perrault et al. Nature, 1990, 344, 565 568; Pieken et al. Science, 1991, 253, 314317; Usman and Cedergren, Trends in Biochem. Sci., 1992, 17, 334 339; Usman et al. International Publication PCT No. WO 93/15187; Sproat, U.S. Pat. No. 5,334,711 and Beigelman et al., 1995, J. Biol. Chem., 270, 25702; Beigelman et al., International PCT publication No. WO 97/26270; Beigelman et al., U.S. Pat. No. 5,716,824; Usman et al.).

[0090] In one embodiment, one of the strands of the double-stranded siRNA molecule comprises a nucleotide sequence that is complementary to a nucleotide sequence of a target RNA or a portion thereof, and the second strand of the double-stranded siRNA molecule comprises a nucleotide sequence identical to the nucleotide sequence or a portion thereof of the targeted RNA. In another embodiment, one of the strands of the double-stranded siRNA molecule comprises a nucleotide sequence that is substantially complementary to a nucleotide sequence of a target RNA or a portion thereof, and the second strand of the double-stranded siRNA molecule comprises a nucleotide sequence substantially similar to the nucleotide sequence or a portion thereof of the target RNA. In another embodiment, each strand of the siRNA molecule comprises about 19 to about 23 nucleotides, and each strand comprises at least about 19 nucleotides that are complementary to the nucleotides of the other strand.

[0091] In another aspect the nucleic acid molecules comprise a 5′ and/or a 3′-cap structure. By “cap structure” is meant chemical modifications, which have been incorporated at either terminus of the oligonucleotide (see for example Wincott et al, WO 97/26270). Other useful RNA derivatives incorporate nucleotides having modified carbohydrate moieties, such as 2′O-alkylated residues or 2′-O-methyl ribosyl derivatives and 2′-O-fluoro ribosyl derivatives. The RNA bases may also be modified. Any modified base useful for inhibiting or interfering with the expression of a target sequence may be used. For example, halogenated bases, such as 5-bromouracil and 5-iodouracil can be incorporated. The bases may also be alkylated, for example, 7-methylguanosine can be incorporated in place of a guanosine residue. Non-natural bases that yield successful inhibition can also be incorporated.

[0092] For example the siRNA can be a double-stranded polynucleotide molecule comprising self-complementary sense and antisense regions, wherein the antisense region comprises nucleotide sequence that is complementary to nucleotide sequence in a target nucleic acid molecule or a portion thereof and the sense region having nucleotide sequence corresponding to the target nucleic acid sequence or a portion thereof. The siRNA can be assembled from two separate oligonucleotides, where one strand is the sense strand and the other is the antisense strand, wherein the antisense and sense strands are self-complementary (i.e. each strand comprises nucleotide sequence that is complementary to nucleotide sequence in the other strand; such as where the antisense strand and sense strand form a duplex or double stranded structure, for example wherein the double stranded region is about 15 to about 30, e.g., about 15, 16, 17, 18, 19, 20, 21, 22, 23, 24, 25, 26, 27, 28, 29 or 30 base pairs; the antisense strand comprises nucleotide sequence that is complementary to nucleotide sequence in a target nucleic acid molecule or a portion thereof and the sense strand comprises nucleotide sequence corresponding to the target nucleic acid sequence or a portion thereof (e.g., about 15 to about 25 or more nucleotides of the siRNA molecule are complementary to the target nucleic acid or a portion thereof). Alternatively, the siRNA is assembled from a single oligonucleotide, where the self-complementary sense and antisense regions of the siRNA are linked by means of a nucleic acid based or non-nucleic acid-based linker(s). The siRNA can be a polynucleotide with a duplex, asymmetric duplex, hairpin or asymmetric hairpin secondary structure, having self-complementary sense and antisense regions, wherein the antisense region comprises nucleotide sequence that is complementary to nucleotide sequence in a separate target nucleic acid molecule or a portion thereof and the sense region having nucleotide sequence corresponding to the target nucleic acid sequence or a portion thereof. The siRNA can be a circular single-stranded polynucleotide having two or more loop structures and a stem comprising self-complementary sense and antisense regions, wherein the antisense region comprises nucleotide sequence that is complementary to nucleotide sequence in a target nucleic acid molecule or a portion thereof and the sense region having nucleotide sequence corresponding to the target nucleic acid sequence or a portion thereof, and wherein the circular polynucleotide can be processed either in vivo or in vitro to generate an active siRNA molecule capable of mediating RNAi. The siRNA can also comprise a single stranded polynucleotide having nucleotide sequence complementary to nucleotide sequence in a target nucleic acid molecule or a portion thereof (for example, where such siRNA molecule does not require the presence within the siRNA molecule of nucleotide sequence corresponding to the target nucleic acid sequence or a portion thereof), wherein the single stranded polynucleotide can further comprise a terminal phosphate group, such as a 5′-phosphate (see for example Martinez et al., 2002, Cell., 110, 563-574 and Schwarz et al., 2002, Molecular Cell, 10, 537-568), or 5′,3′-diphosphate. In certain embodiments, the siRNA molecule of the invention comprises separate sense and antisense sequences or regions, wherein the sense and antisense regions are covalently linked by nucleotide or non-nucleotide linkers molecules as is known in the art, or are alternately non-covalently linked by ionic interactions, hydrogen bonding, van der waals interactions, hydrophobic interactions, and/or stacking interactions.

[0093] The siNA are composed of nucleotide sequences that are complementary to nucleotide sequences of a target gene. “Complementarity” as used herein refers to the degree to which a nucleic acid can form hydrogen bonds with another nucleic acid sequence by either traditional Watson-Crick or other non-traditional bonds. The binding free energy for a nucleic acid molecule with its complementary sequence is sufficient to allow the relevant function of the nucleic acid to proceed, e.g., RNAi activity. Methods for determining binding free energies for nucleic acid molecules is well known in the art (see, e.g., Turner et al., 1987, CSH Symp. Quant. Biol. LII pp. 123-133; Frier et al., 1986, Proc. Nat. Acad. Sci. USA 83:9373-9377; Turner et al., 1987, J. Am. Chem. Soc. 109:3783-3785). A percent complementarity indicates the percentage of contiguous residues in a nucleic acid molecule that can form hydrogen bonds (e.g., Watson-Crick base pairing) with a second nucleic acid sequence (e.g., 5, 6, 7, 8, 9, or 10 nucleotides out of a total of 10 nucleotides in the first oligonucleotide being based paired to a second nucleic acid sequence having 10 nucleotides represents 50%, 60%, 70%, 80%, 90%, and 100% complementary respectively).

[0094] “Perfectly complementary” as used herein means that all the contiguous residues of a nucleic acid sequence will hydrogen bond with the same number of contiguous residues in a second nucleic acid sequence. In one embodiment, an siNA molecule of the invention comprises about 15 to about 30 or more (e.g., about 15, 16, 17, 18, 19, 20, 21, 22, 23, 24, 25, 26, 27, 28, 29, or 30 or more) nucleotides that are complementary to one or more target nucleic acid molecules or a portion thereof.

[0095] The siNA molecules modulate gene expression. The term “modulate” as used herein refers to change in the expression of the gene, or level of RNA molecule or equivalent RNA molecules encoding one or more proteins or protein subunits, or activity of one or more proteins or protein subunits such that it is up regulated or down regulated, and such that expression, level, or activity is greater than or less than that observed in the absence of the modulator.

[0096] Inhibition of gene expression indicates that the expression of the gene, or level of RNA molecules or equivalent RNA molecules encoding one or more proteins or protein subunits, or activity of one or more proteins or protein subunits, is reduced below that observed in the absence of the nucleic acid molecules (e.g., siRNA) of the invention. In one embodiment, inhibition, down-regulation or reduction with an siNA molecule is below that level observed in the presence of an inactive or attenuated molecule. In another embodiment, inhibition, down-regulation, or reduction with siNA molecules is below that level observed in the presence of, for example, an siNA molecule with scrambled sequence or with mismatches. A therapeutically or prophylactically significant reduction is about 30%, about 40%, about 50%, about 60%, about 70%, about 80%, about 90%, about 100%, about 125%, about 150% or more compared to a control.

[0097] A gene is a nucleic acid that encodes an RNA, for example, nucleic acid sequences including, but not limited to, structural genes encoding a polypeptide. A gene can also encode a functional RNA (fRNA) or non-coding RNA (ncRNA), such as small temporal RNA (stRNA), micro RNA (miRNA), small nuclear RNA (snRNA), short interfering RNA (siRNA), small nucleolar RNA (snRNA), ribosomal RNA (rRNA), transfer RNA (tRNA) and precursor RNAs thereof.

[0098] In some embodiments an siNA is an shRNA, shRNA-mir, or microRNA molecule encoded by and expressed from a genomically integrated transgene or a plasmid-based expression vector. Thus, in some embodiments a molecule capable of inhibiting mRNA expression, or microRNA activity, is a transgene or plasmid-based expression vector that encodes a small-interfering nucleic acid. Such transgenes and expression vectors can employ either polymerase II or polymerase III promoters to drive expression of these shRNAs and result in functional siNAs in cells. The former polymerase permits the use of classic protein expression strategies, including inducible and tissue-specific expression systems. In some embodiments, transgenes and expression vectors are controlled by tissue specific promoters. In other embodiments transgenes and expression vectors are controlled by inducible promoters, such as tetracycline inducible expression systems.

[0099] In another embodiment, a short interfering nucleic acid of the invention is expressed in mammalian cells using a mammalian expression vector. The recombinant mammalian expression vector may be capable of directing expression of the nucleic acid preferentially in a particular cell type (e.g., tissue-specific regulatory elements are used to express the nucleic acid). Tissue specific regulatory elements are known in the art. Non-limiting examples of suitable tissue-specific promoters include the myosin heavy chain promoter, albumin promoter, lymphoid-specific promoters, neuron specific promoters, pancreas specific promoters, and mammary gland specific promoters. Developmentally-regulated promoters are also encompassed, for example the murine hox promoters and the a-fetoprotein promoter.

[0100] Viral-mediated delivery mechanisms to deliver siNAs to cells in vitro and in vivo have been described in Xia, H. et al. (2002) Nat Biotechnol 20(10):1006). Plasmid- or viral-mediated delivery mechanisms of shRNA may also be employed to deliver shRNAs to cells in vitro and in vivo as described in Rubinson, D. A., et al. ((2003) Nat. Genet. 33:401-406) and Stewart, S. A., et al. ((2003) RNA 9:493-501). Other methods of introducing siNA molecules of the present invention to target cells include a variety of art-recognized techniques including, but not limited to, calcium phosphate or calcium chloride co-precipitation, DEAE-dextran-mediated transfection, lipofection, or electroporation as well as a number of commercially available transfection kits (e.g., OLIGOFECTAMINE® Reagent from Invitrogen) (see, e.g. Sui, G. et al. (2002) Proc. Natl. Acad. Sci. USA 99:5515-5520; Calegari, F. et al. (2002) Proc. Natl. Acad. Sci., USA Oct. 21, 2002; J-M Jacque, K. Triques and M. Stevenson (2002) Nature 418:435-437).

[0101] In another embodiment of the invention, the siNA may be transported or conducted across biological membranes using carrier polymers which comprise, for example, contiguous, basic subunits, at a rate higher than the rate of transport of siNA molecules which are not associated with carrier polymers. Combining a carrier polymer with siNA, with or without a cationic transfection agent, results in the association of the carrier polymer and the siNA. The carrier polymer may efficiently deliver the siNA, across biological membranes both in vitro and in vivo. Accordingly, the invention provides methods for delivery of an siNA, across a biological membrane, e.g., a cellular membrane including, for example, a nuclear membrane, using a carrier polymer. The invention also provides compositions comprising an siNA in association with a carrier polymer.

[0102] Other inhibitor molecules that can be used include sense and antisense nucleic acids (single or double stranded), ribozymes, peptides, DNAzymes, peptide nucleic acids (PNAs), triple helix forming oligonucleotides, antibodies, and aptamers and modified form(s) thereof directed to sequences in gene(s), RNA transcripts, or proteins. Antisense and ribozyme suppression strategies have led to the reversal of a tumor phenotype by reducing expression of a gene product or by cleaving a mutant transcript at the site of the mutation (Carter and Lemoine Br. J. Cancer. 67(5):869-76, 1993; Lange et al., Leukemia. 6(11):1786-94, 1993; Valera et al., J. Biol. Chem. 269(46):28543-6, 1994; Dosaka-Akita et al., Am. J. Clin. Pathol. 102(5):660-4, 1994; Feng et al., Cancer Res. 55(10):2024-8, 1995; Quattrone et al., Cancer Res. 55(1):90-5, 1995; Lewin et al., Nat Med. 4(8):967-71, 1998). For example, neoplastic reversion was obtained using a ribozyme targeted to an H-Ras mutation in bladder carcinoma cells (Feng et al., Cancer Res. 55(10):2024-8, 1995). Ribozymes have also been proposed as a means of both inhibiting gene expression of a mutant gene and of correcting the mutant by targeted trans-splicing (Sullenger and Cech Nature 371(6498):619-22, 1994; Jones et al., Nat. Med. 2(6):643-8, 1996). Ribozyme activity may be augmented by the use of, for example, non-specific nucleic acid binding proteins or facilitator oligonucleotides (Herschlag et al., Embo J. 13(12):2913-24, 1994; Jankowsky and Schwenzer Nucleic Acids Res. 24(3):423-9,1996). Multitarget ribozymes (connected or shotgun) have been suggested as a means of improving efficiency of ribozymes for gene suppression (Ohkawa et al., Nucleic Acids Symp Ser. (29):121-2, 1993).

[0103] Anti-sense oligonucleotides may be designed to hybridize to the complementary sequence of nucleic acid, pre-mRNA or mature mRNA, interfering with the production of an viral protein encoded by a given DNA sequence (e.g. either native polypeptide or a mutant form thereof), so that its expression is reduce or prevented altogether. Anti-sense techniques may be used to target a coding sequence; a control sequence of a gene, e.g. in the 5′ flanking sequence, whereby the anti-sense oligonucleotides can interfere with control sequences. Anti-sense oligonucleotides may be DNA or RNA and may be of around 14-23 nucleotides, particularly around 15-18 nucleotides, in length. The construction of antisense sequences and their use is described in Peyman and Uhlmann, Chemical Reviews, 90:543-584, (1990), and Crooke, Ann. Rev. Pharmacol. Toxicol., 32:329-376, (1992).

[0104] It may be preferable that there is complete sequence identity in the sequence used for down-regulation of expression of a target sequence, and the target sequence, though total complementarity or similarity of sequence is not essential. One or more nucleotides may differ in the sequence used from the target gene. Thus, a sequence employed in a down-regulation of gene expression in accordance with the present invention may be a wild-type sequence (e.g. gene) selected from those available, or a mutant, derivative, variant or allele, by way of insertion, addition, deletion or substitution of one or more nucleotides, of such a sequence.

[0105] The sequence need not include an open reading frame or specify an RNA that would be translatable. It may be preferred for there to be sufficient homology for the respective sense RNA molecules to hybridize. There may be down regulation of gene expression even where there is about 5%, 10%, 15% or 20% or more mismatch between the sequence used and the target gene.

[0106] Triple helix approaches have also been investigated for sequence-specific gene suppression. Triple helix forming oligonucleotides have been found in some cases to bind in a sequence-specific manner (Postel et al., Proc. Natl. Acad. Sci. U.S.A. 88(18):8227-31, 1991; Duval-Valentin et al., Proc. Natl. Acad. Sci. U.S.A. 89(2):504-8, 1992; Hardenbol and Van Dyke Proc. Natl. Acad. Sci. U.S.A. 93(7):2811-6, 1996; Porumb et al., Cancer Res. 56(3):515-22, 1996). Similarly, peptide nucleic acids have been shown to inhibit gene expression (Hanvey et al., Antisense Res. Dev. 1(4):307-17, 1991; Knudsen and Nielson Nucleic Acids Res. 24(3):494-500, 1996; Taylor et al., Arch. Surg. 132(11):1177-83, 1997). Minor-groove binding polyamides can bind in a sequence-specific manner to DNA targets and hence may represent useful small molecules for future suppression at the DNA level (Trauger et al., Chem. Biol. 3(5):369-77, 1996). In addition, suppression has been obtained by interference at the protein level using dominant negative mutant peptides and antibodies (Herskowitz Nature 329(6136):219-22, 1987; Rimsky et al., Nature 341(6241):453-6, 1989; Wright et al., Proc. Natl. Acad. Sci. U.S.A. 86(9):3199-203, 1989). In some cases suppression strategies have led to a reduction in RNA levels without a concomitant reduction in proteins, whereas in others, reductions in RNA have been mirrored by reductions in protein.

[0107] The diverse array of suppression strategies that can be employed includes the use of DNA and/or RNA aptamers that can be selected to target, for example, a viral protein of interest.

[0108] The siNA that targets a viral target may be a single siNA or multiple siNA. Thus, a mixture of siNAs targeting either the same viral gene or at least 2, 3, 4, 5 or up to at least 10 different viral genes may be used. Each of the siNAs, can be screened for potential off-target effects may be analyzed using, for example, expression profiling. Such methods are known to one skilled in the art and are described, for example, in Jackson et al. Nature Biotechnology 6:635-637, 2003. In addition to expression profiling, one may also screen the potential target sequences for similar sequences in the sequence databases to identify potential sequences which may have off-target effects. One may initially screen the proposed siNAs to avoid potential off-target silencing using the sequence identity analysis by any known sequence comparison methods, such as BLAST. Design of siNAs is known to the skilled artisan, see for example, Dykxhoorn & Lieberman 2006 “Running interference: prospects and obstacles to using small interfering RNAs as small molecule drugs” Annu Rev Biomed Eng.

[0109] The dose of the siNA will be in an amount necessary to effect RNA interference, e.g., post translational gene silencing, of the particular target gene, thereby leading to inhibition of target gene expression or inhibition of activity or level of the protein encoded by the target gene. Assays to determine expression of the target sequence are known in the art. In one embodiment, a reporter gene, e.g., GFP, may be fused to the target sequence in a test cell, e.g., in a test animal. Effectiveness of silencing can then be measured by examining the reporter gene expression. Target cells which have been transfected with the siNA molecules can be identified by routine techniques such as immunofluorescence, phase contrast microscopy and fluorescence microscopy. In one embodiment, reduced levels of target gene mRNA may be measured by in situ hybridization (Montgomery et al., (1998) Proc. Natl. Acad. Sci., USA 95:15502-15507) or Northern blot analysis (Ngo, et al. (1998)) Proc. Natl. Acad. Sci., USA 95:14687-14692). Preferably, target gene transcription is measured using quantitative real-time PCR (Gibson et al., Genome Research 6:995-1001, 1996; Heid et al., Genome Research 6:986-994, 1996).

[0110] As used herein, “inhibition of target gene expression” includes any decrease in expression or protein activity or level of the target gene or protein encoded by the target gene as compared to a situation wherein no RNA interference has been induced. The decrease may be of at least about 30%, about 40%, about 50%, about 60%, about 70%, about 80%, about 90%, about 95% or about 99% or more as compared to the expression of a target gene or the activity or level of the protein encoded by a target gene which has not been targeted by an siNA.

[0111] The molecules useful herein are isolated molecules. As used herein, the term “isolated” means that the referenced material is removed from its native environment, e.g., a cell. Thus, an isolated biological material can be free of some or all cellular components, i.e., components of the cells in which the native material is occurs naturally (e.g., cytoplasmic or membrane component). The isolated molecules may be substantially pure and essentially free of other substances with which they may be found in nature or in vivo systems to an extent practical and appropriate for their intended use. In particular, the molecules are sufficiently pure and are sufficiently free from other biological constituents of their hosts cells so as to be useful in, for example, producing pharmaceutical preparations or sequencing. Because an isolated peptide of the invention may be admixed with a pharmaceutically acceptable carrier in a pharmaceutical preparation, the peptide may comprise only a small percentage by weight of the preparation. The peptide is nonetheless substantially pure in that it has been substantially separated from the substances with which it may be associated in living systems. In some embodiments, the peptide is a synthetic peptide.

[0112] The term “purified” in reference to a protein or a nucleic acid, refers to the separation of the desired substance from contaminants to a degree sufficient to allow the practitioner to use the purified substance for the desired purpose. Preferably this means at least one order of magnitude of purification is achieved, more preferably two or three orders of magnitude, most preferably four or five orders of magnitude of purification of the starting material or of the natural material. In specific embodiments, a purified thymus derived peptide is at least 60%, at least 80%, or at least 90% of total protein or nucleic acid, as the case may be, by weight. In a specific embodiment, a purified thymus derived peptide is purified to homogeneity as assayed by, e.g., sodium dodecyl sulfate polyacrylamide gel electrophoresis, or agarose gel electrophoresis.

[0113] The therapeutic compounds described herein can be administered in combination with other therapeutic agents and such administration may be simultaneous or sequential. When the other therapeutic agents are administered simultaneously they can be administered in the same or separate formulations, but are administered at the same time. The administration of the other therapeutic agent, including chemotherapeutics and TLR activators/agonists and the compounds of the invention can also be temporally separated, meaning that the therapeutic agents are administered at a different time, either before or after, the administration of the therapeutics described herein. The separation in time between the administration of these compounds may be a matter of minutes or it may be longer.

[0114] Thus, in some instances, the invention also involves administering another cancer treatment (e.g., radiation therapy, chemotherapy or surgery) to a subject. Examples of conventional cancer therapies include treatment of the cancer with agents such as All-trans retinoic acid, Actinomycin D, Adriamycin, anastrozole, Azacitidine, Azathioprine, Alkeran, Ara-C, Arsenic Trioxide (Trisenox), BiCNU Bleomycin, Busulfan, CCNU, Carboplatin, Capecitabine, Cisplatin, Chlorambucil, Cyclophosphamide, Cytarabine, Cytoxan, DTIC, Daunorubicin, Docetaxel, Doxifluridine, Doxorubicin, 5-fluorouracil, Epirubicin, Epothilone, Etoposide, exemestane, Erlotinib, Fludarabine, Fluorouracil, Gemcitabine, Hydroxyurea, Herceptin, Hydrea, Ifosfamide, Irinotecan, Idarubicin, Imatinib, letrozole, Lapatinib, Leustatin, 6-MP, Mithramycin, Mitomycin, Mitoxantrone, Mechlorethamine, megestrol, Mercaptopurine, Methotrexate, Mitoxantrone, Navelbine, Nitrogen Mustard, Oxaliplatin, Paclitaxel, pamidronate disodium, Pemetrexed, Rituxan, 6-TG, Taxol, Topotecan, tamoxifen, taxotere, Teniposide, Tioguanine, toremifene, trimetrexate, trastuzumab, Valrubicin, Vinblastine, Vincristine, Vindesine, Vinorelbine, Velban, VP-16, and Xeloda.

[0115] Other therapeutics for cancer involve antibodies or other binding proteins conjugated to a cytotoxic agents. The conjugates include an antibody conjugated to a cytotoxic agent such as a chemotherapeutic agent, toxin (e.g. an enzymatically active toxin of bacterial, fungal, plant or animal origin, or fragments thereof, or a small molecule toxin), or a radioactive isotope (i.e., a radioconjugate). Other antitumor agents that can be conjugated to the antibodies of the invention include BCNU, streptozoicin, vincristine and 5-fluorouracil, the family of agents known collectively LL-E33288 complex described in U.S. Pat. Nos. 5,053,394, 5,770,710, as well as esperamicins (U.S. Pat. No. 5,877,296). Enzymatically active toxins and fragments thereof which can be used in the conjugates include diphtheria A chain, nonbinding active fragments of diphtheria toxin, exotoxin A chain (from Pseudomonas aeruginosa), abrin A chain, modeccin A chain, alpha-sarcin, Aleurites fordii proteins, dianthin proteins, Phytolaca americana proteins (PAPI, PAPII, and PAP-S), momordica charantia inhibitor, curcin, crotin, sapaonaria officinalis inhibitor, gelonin, mitogellin, restrictocin, phenomycin, enomycin and the tricothecenes.

[0116] For selective destruction of the cell, the antibody may comprise a highly radioactive atom. A variety of radioactive isotopes are available for the production of radioconjugated antibodies. Examples include At²¹¹, I¹³¹, I¹²⁵, Y⁹⁰, Re¹⁸⁶, Re¹⁸⁸, Sm¹⁵³, Bi²¹², P³², Pb²¹² and radioactive isotopes of Lu. When the conjugate is used for detection, it may comprise a radioactive atom for scintigraphic studies, for example tc⁹⁹m or I¹²³, or a spin label for nuclear magnetic resonance (NMR) imaging (also known as magnetic resonance imaging, mri), such as iodine-123, iodine-131, indium-111, fluorine-19, carbon-13, nitrogen-15, oxygen-17, gadolinium, manganese or iron.

[0117] The radio- or other labels may be incorporated in the conjugate in known ways. For example, the peptide may be biosynthesized or may be synthesized by chemical amino acid synthesis using suitable amino acid precursors involving, for example, fluorine-19 in place of hydrogen. Labels such as tc^{99m} or I¹²³, Re¹⁸⁶, Re¹⁸⁸ and In¹¹¹ can be attached via a cysteine residue in the peptide. Yttrium-90 can be attached via a lysine residue. The IODOGEN method (Fraker et al (1978) Biochem. Biophys. Res. Commun. 80: 49-57 can be used to incorporate iodine-123. “Monoclonal Antibodies in Immunoscintigraphy” (Chatal, CRC Press 1989) describes other methods in detail.

[0118] Conjugates of the antibody and cytotoxic agent may be made using a variety of bifunctional protein coupling agents such as N-succinimidyl-3-(2-pyridyldithio)propionate (SPDP), succinimidyl-4-(N-maleimidomethyl)cyclohexane-1-carboxylate, iminothiolane (IT), bifunctional derivatives of imidoesters (such as dimethyl adipimidate HCl), active esters (such as disuccinimidyl suberate), aldehydes (such as glutaraldehyde), bis-azido compounds (such as bis(p-azidobenzoyl)hexanediamine), bis-diazonium derivatives (such as bis-(p-diazoniumbenzoyl)-ethylenediamine), diisocyanates (such as toluene 2,6-diisocyanate), and bis-active fluorine compounds (such as 1,5-difluoro-2,4-dinitrobenzene). For example, a ricin immunotoxin can be prepared as described in Vitetta et al., Science 238:1098 (1987). Carbon-14-labeled 1-isothiocyanatobenzyl-3-methyldiethylene triaminepentaacetic acid (MX-DTPA) is an exemplary chelating agent for conjugation of radionucleotide to the antibody. See WO94/11026. The linker may be a “cleavable linker” facilitating release of the cytotoxic drug in the cell. For example, an acid-labile linker, peptidase-sensitive linker, photolabile linker, dimethyl linker or disulfide-containing linker (Chari et al., Cancer Research 52:127-131 (1992); U.S. Pat. No. 5,208,020) may be used.

[0119] TLR activation causes plant viral gene transcription. Therefore, the compositions of the invention can be combined with a TLR activation therapy, in order to induce viral transcription. TLR activators or agonists include but are not limited to TLR 3, 7, 8, and 9 agonists.

[0120] The term “TLR3 agonist” refers to a molecule that interacts with (directly or indirectly) and is capable of activating a TLR3 polypeptide to induce a full or partial receptor-mediated response (i.e. induces TLR3-mediated signaling). A TLR3 agonist, thus, may or may not bind to a TLR3 polypeptide, and may or may not interact directly with the TLR3 polypeptide. TLR3 agonists include for instance, naturally-occurring double-stranded RNA (dsRNA); synthetic ds RNA; and synthetic dsRNA analogs, such as those described in Alexopoulou et al. (2001) Nature 413:732-738. An exemplary, non-limiting example of a synthetic ds RNA analog is poly(I:C).

[0121] “TLR7 agonist” and “TLR8 agonists” include single stranded RNA having specific motifs as well as other molecules that interact with (directly or indirectly) and are capable of activating a TLR7 and/or TLR8 polypeptide to induce a full or partial receptor-mediated response (i.e. induces TLR7 and/or 8-mediated signaling).

[0122] A “TLR9 agonist” as used herein is a molecule that interacts with (directly or indirectly) and is capable of activating a TLR9 polypeptide to induce a full or partial receptor-mediated response (i.e. induces TLR9-mediated signaling). TLR9 agonists include but are not limited to CpG oligonucleotides.

[0123] The therapeutics of the invention may also be combined with CLIP inhibitors. CLIP inhibitors are described extensively in US2011/0118175 and US2010/0166782, each of which are incorporated by reference. CLIP inhibitors include, for instance, but are not limited to FRIMAVLAS (SEQ ID NO. 439).

[0124] The invention also involves combinations of the active agents described herein with compounds that make cells more immunogenic, such as autophagy inhibitors and/or a fatty acid metabolism inhibitors. Thus, in some embodiments the invention involves the co-administration of a vaccine or anti-viral therapy of the invention with an autophagy inhibitor and/or a fatty acid metabolism inhibitor. Autophagy inhibitors and fatty acid metabolism inhibitors have been described extensively in U.S. Provisional Application No. 61/511,289 and U.S. patent application Ser. No. 13/054,147 and WO2010/008554 each of which is incorporated by reference.

[0125] When used in combination with the therapies of the invention the dosages of known therapies may be reduced in some instances, to avoid side effects.

[0126] Cancer therapies and their dosages, routes of administration and recommended usage are known in the art and have been described in such literature as the Physician's Desk Reference (56^{th} ed., 2002). In some embodiments, the therapeutic compounds of the invention are formulated into a pharmaceutical composition that further comprises one or more additional anticancer agents.

[0127] The compounds of the invention are administered in prophylactically or therapeutically effective amounts. A prophylactically or therapeutically effective amount means that amount necessary to attain, at least partly, the desired effect, or to delay the onset of, inhibit the progression of, prevent the reoccurrence of, or halt altogether, the onset or progression of the viral infection and/or the resultant disease being treated, i.e. cancer. Such amounts will depend, of course, on the particular condition being treated, the severity of the condition and individual patient parameters including age, physical condition, size, weight and concurrent treatment. These factors are well known to those of ordinary skill in the art and can be addressed with no more than routine experimentation. It is preferred generally that a maximum dose be used, that is, the highest safe dose according to sound medical judgment. It will be understood by those of ordinary skill in the art; however, that a lower dose or tolerable dose may be administered for medical reasons, psychological reasons or for virtually any other reason.

[0128] The term “preventing” or “reducing” or “inhibiting” as used herein refers to preventing plant viral infection in an individual susceptible for infection or re-infection. Accordingly, administration of a prophylactic agent can occur prior to the manifestation of symptoms characteristic of the infection or the resultant disease, such that the disease or infection is prevented or, alternatively, delayed in its progression. Any mode of administration of the therapeutic agents of the invention, as described herein or as known in the art, including topical administration or mucosal administration of the compounds of the instant invention, may be utilized for the prophylactic treatment of the plant infection or resultant disease.

[0129] An effective amount for treating precancerous or cancerous tissue may be an amount sufficient to prevent, delay or inhibit the development of a tumor or slow the growth or reverse the growth of a tumor in the subject compared to the levels in the absence of treatment. According to some aspects of the invention, an effective amount is that amount of a compound of the invention alone or in combination with another medicament, which when combined or co-administered or administered alone, results in a biological affect associated with treating the precancerous or cancerous tissue. Prevention or inhibition as used in this context refers to any reduction or delay in tumor formation as a result of the treatment when compared to an untreated subject.

[0130] As defined herein, a therapeutically effective amount of an active compound of the invention (i.e., an effective dosage) ranges from about 0.001 to 3000 mg/kg body weight, preferably about 0.01 to 2500 mg/kg body weight, more preferably about 0.1 to 2000 mg/kg body weight, and even more preferably about 1 to 1000 mg/kg, 2 to 900 mg/kg, 3 to 800 mg/kg, 4 to 700 mg/kg, or 5 to 600 mg/kg body weight. In one embodiment, the average adult is 60 kg and is administered about 0.5 to 50 mg, about 1 to 45 mg, about 2 to 40, about 3 to 35 mg, about 4 to 30 mg, about 5 to 25 mg, about 6 to 20 mg of compound. The skilled artisan will appreciate that certain factors may influence the dosage required to effectively treat a subject, including but not limited to the severity of the disease or disorder, previous treatments, the general health and/or age of the subject, and other diseases present. Moreover, treatment of a subject with a therapeutically effective amount of an active compound can include a single treatment or, preferably, can include a series of treatments.

[0131] Toxicity and efficacy of the prophylactic and/or therapeutic protocols of the present invention can be determined by standard pharmaceutical procedures in cell cultures or experimental animals, e.g., for determining the LD50 (the dose lethal to 50% of the population) and the ED50 (the dose therapeutically effective in 50% of the population). The dose ratio between toxic and therapeutic effects is the therapeutic index and it can be expressed as the ratio LD50/ED50. Prophylactic and/or therapeutic agents that exhibit large therapeutic indices are preferred. While prophylactic and/or therapeutic agents that exhibit toxic side effects may be used, care should be taken to design a delivery system that targets such agents to the site of affected tissue in order to minimize potential damage to uninfected cells and, thereby, reduce side effects.

[0132] The data obtained from the cell culture assays, animal studies and human studies can be used in formulating a range of dosage of the prophylactic and/or therapeutic agents for use in humans. The dosage of such agents lies preferably within a range of circulating concentrations that include the ED50 with little or no toxicity. The dosage may vary within this range depending upon the dosage form employed and the route of administration utilized. For any agent used in the method of the invention, the therapeutically effective dose can be estimated initially from cell culture assays. A dose may be formulated in animal models to achieve a circulating plasma concentration range that includes the IC50 (i.e., the concentration of the test compound that achieves a half-maximal inhibition of symptoms) as determined in cell culture. Such information can be used to more accurately determine useful doses in humans. Levels in plasma may be measured, for example, by high performance liquid chromatography.

[0133] Multiple doses of the molecules of the invention are also contemplated. In some instances, when the molecules of the invention are administered with another therapeutic, for instance, an anti-cancer agent a sub-therapeutic dosage of either or both of the molecules may be used. A “sub-therapeutic dose” as used herein refers to a dosage which is less than that dosage which would produce a therapeutic result in the subject if administered in the absence of the other agent.

[0134] Pharmaceutical compositions of the present invention comprise an effective amount of one or more agents, dissolved or dispersed in a pharmaceutically acceptable carrier. The phrases “pharmaceutical or pharmacologically acceptable” refers to molecular entities and compositions that do not produce an adverse, allergic or other untoward reaction when administered to an animal, such as, for example, a human, as appropriate. Moreover, for animal (e.g., human) administration, it will be understood that preparations should meet sterility, pyrogenicity, general safety and purity standards as required by FDA Office of Biological Standards. The compounds are generally suitable for administration to humans. This term requires that a compound or composition be nontoxic and sufficiently pure so that no further manipulation of the compound or composition is needed prior to administration to humans.

[0135] As used herein, “pharmaceutically acceptable carrier” includes any and all solvents, dispersion media, coatings, surfactants, antioxidants, preservatives (e.g., antibacterial agents, antifungal agents), isotonic agents, absorption delaying agents, salts, preservatives, drugs, drug stabilizers, gels, binders, excipients, disintegration agents, lubricants, sweetening agents, flavoring agents, dyes, such like materials and combinations thereof, as would be known to one of ordinary skill in the art (see, for example, Remington's Pharmaceutical Sciences (1990), incorporated herein by reference). Except insofar as any conventional carrier is incompatible with the active ingredient, its use in the therapeutic or pharmaceutical compositions is contemplated. The compounds may be sterile or non-sterile.

[0136] The agent may comprise different types of carriers depending on whether it is to be administered in solid, liquid or aerosol form, and whether it need to be sterile for such routes of administration as injection. The present invention can be administered intravenously, intradermally, intraarterially, intralesionally, intratumorally, intracranially, intraarticularly, intraprostaticaly, intrapleurally, intratracheally, intranasally, intravitreally, intravaginally, intrarectally, topically, intratumorally, intramuscularly, intraperitoneally, subcutaneously, subconjunctival, intravesicularlly, mucosally, intrapericardially, intraumbilically, intraocularally, orally, topically, locally, inhalation (e.g., aerosol inhalation), injection, infusion, continuous infusion, localized perfusion bathing target cells directly, via a catheter, via a lavage, in cremes, in lipid compositions (e.g., liposomes), or by other method or any combination of the forgoing as would be known to one of ordinary skill in the art (see, for example, Remington's Pharmaceutical Sciences (1990), incorporated herein by reference). In a particular embodiment, intraperitoneal injection is contemplated.

[0137] In any case, the composition may comprise various antioxidants to retard oxidation of one or more components. Additionally, the prevention of the action of microorganisms can be brought about by preservatives such as various antibacterial and antifungal agents, including but not limited to parabens (e.g., methylparabens, propylparabens), chlorobutanol, phenol, sorbic acid, thimerosal or combinations thereof.

[0138] The agent may be formulated into a composition in a free base, neutral or salt form. Pharmaceutically acceptable salts, include the acid addition salts, e.g., those formed with the free amino groups of a proteinaceous composition, or which are formed with inorganic acids such as for example, hydrochloric or phosphoric acids, or such organic acids as acetic, oxalic, tartaric or mandelic acid. Salts formed with the free carboxyl groups also can be derived from inorganic bases such as for example, sodium, potassium, ammonium, calcium or ferric hydroxides; or such organic bases as isopropylamine, trimethylamine, histidine or procaine.

[0139] In embodiments where the composition is in a liquid form, a carrier can be a solvent or dispersion medium comprising but not limited to, water, ethanol, polyol (e.g., glycerol, propylene glycol, liquid polyethylene glycol, etc.), lipids (e.g., triglycerides, vegetable oils, liposomes) and combinations thereof. The proper fluidity can be maintained, for example, by the use of a coating, such as lecithin; by the maintenance of the required particle size by dispersion in carriers such as, for example liquid polyol or lipids; by the use of surfactants such as, for example hydroxypropylcellulose; or combinations thereof such methods. In many cases, it will be preferable to include isotonic agents, such as, for example, sugars, sodium chloride or combinations thereof.

[0140] The compounds of the invention may be administered directly to a tissue. Direct tissue administration may be achieved by direct injection. The compounds may be administered once, or alternatively they may be administered in a plurality of administrations. If administered multiple times, the compounds may be administered via different routes. For example, the first (or the first few) administrations may be made directly into the affected tissue while later administrations may be systemic.

[0141] The formulations of the invention are administered in pharmaceutically acceptable solutions, which may routinely contain pharmaceutically acceptable concentrations of salt, buffering agents, preservatives, compatible carriers, adjuvants, and optionally other therapeutic ingredients.

[0142] According to the methods of the invention, the compound may be administered in a pharmaceutical composition. In general, a pharmaceutical composition comprises the compound of the invention and a pharmaceutically-acceptable carrier. Pharmaceutically-acceptable carriers for the compounds of the invention are well-known to those of ordinary skill in the art. As used herein, a pharmaceutically-acceptable carrier means a non-toxic material that does not interfere with the effectiveness of the biological activity of the active ingredients.

[0143] Pharmaceutically acceptable carriers include diluents, fillers, salts, buffers, stabilizers, solubilizers and other materials which are well-known in the art. Exemplary pharmaceutically acceptable carriers for peptides in particular are described in U.S. Pat. No. 5,211,657. Such preparations may routinely contain salt, buffering agents, preservatives, compatible carriers, and optionally other therapeutic agents. When used in medicine, the salts should be pharmaceutically acceptable, but non-pharmaceutically acceptable salts may conveniently be used to prepare pharmaceutically-acceptable salts thereof and are not excluded from the scope of the invention. Such pharmacologically and pharmaceutically-acceptable salts include, but are not limited to, those prepared from the following acids: hydrochloric, hydrobromic, sulfuric, nitric, phosphoric, maleic, acetic, salicylic, citric, formic, malonic, succinic, and the like. Also, pharmaceutically-acceptable salts can be prepared as alkaline metal or alkaline earth salts, such as sodium, potassium or calcium salts.

[0144] The compounds of the invention may be formulated into preparations in solid, semi-solid, liquid or gaseous forms such as tablets, capsules, powders, granules, ointments, solutions, depositories, inhalants and injections, and usual ways for oral, parenteral or surgical administration. The invention also embraces pharmaceutical compositions which are formulated for local administration, such as by implants.

[0145] Compositions suitable for oral administration may be presented as discrete units, such as capsules, tablets, lozenges, each containing a predetermined amount of the active agent. Other compositions include suspensions in aqueous liquids or non-aqueous liquids, such as a syrup, an elixir or an emulsion.

[0146] For oral administration, the compounds can be formulated readily by combining the active compounds with pharmaceutically acceptable carriers well known in the art. Such carriers enable the compounds of the invention to be formulated as tablets, pills, dragees, capsules, liquids, gels, syrups, slurries, suspensions and the like, for oral ingestion by a subject to be treated. Pharmaceutical preparations for oral use can be obtained as solid excipient, optionally grinding a resulting mixture, and processing the mixture of granules, after adding suitable auxiliaries, if desired, to obtain tablets or dragee cores. Suitable excipients are, in particular, fillers such as sugars, including lactose, sucrose, mannitol, or sorbitol; cellulose preparations such as, for example, maize starch, wheat starch, rice starch, potato starch, gelatin, gum tragacanth, methyl cellulose, hydroxypropylmethyl-cellulose, sodium carboxymethylcellulose, and/or polyvinylpyrrolidone (PVP). If desired, disintegrating agents may be added, such as the cross-linked polyvinyl pyrrolidone, agar, or alginic acid or a salt thereof such as sodium alginate. Optionally the oral formulations may also be formulated in saline or buffers for neutralizing internal acid conditions or may be administered without any carriers.

[0147] Dragee cores are provided with suitable coatings. For this purpose, concentrated sugar solutions may be used, which may optionally contain gum arabic, talc, polyvinyl pyrrolidone, carbopol gel, polyethylene glycol, and/or titanium dioxide, lacquer solutions, and suitable organic solvents or solvent mixtures. Dyestuffs or pigments may be added to the tablets or dragee coatings for identification or to characterize different combinations of active compound doses.

[0148] Pharmaceutical preparations which can be used orally include push-fit capsules made of gelatin, as well as soft, sealed capsules made of gelatin and a plasticizer, such as glycerol or sorbitol. The push-fit capsules can contain the active ingredients in admixture with filler such as lactose, binders such as starches, and/or lubricants such as talc or magnesium stearate and, optionally, stabilizers. In soft capsules, the active compounds may be dissolved or suspended in suitable liquids, such as fatty oils, liquid paraffin, or liquid polyethylene glycols. In addition, stabilizers may be added. Microspheres formulated for oral administration may also be used. Such microspheres have been well defined in the art. All formulations for oral administration should be in dosages suitable for such administration.

[0149] For buccal administration, the compositions may take the form of tablets or lozenges formulated in conventional manner.

[0150] For administration by inhalation, the compounds for use according to the present invention may be conveniently delivered in the form of an aerosol spray presentation from pressurized packs or a nebulizer, with the use of a suitable propellant, e.g., dichlorodifluoromethane, trichlorofluoromethane, dichlorotetrafluoroethane, carbon dioxide or other suitable gas. In the case of a pressurized aerosol the dosage unit may be determined by providing a valve to deliver a metered amount. Capsules and cartridges of e.g. gelatin for use in an inhaler or insufflator may be formulated containing a powder mix of the compound and a suitable powder base such as lactose or starch. Techniques for preparing aerosol delivery systems are well known to those of skill in the art. Generally, such systems should utilize components which will not significantly impair the biological properties of the active agent (see, for example, Sciarra and Cutie, “Aerosols,” in Remington's Pharmaceutical Sciences, 18th edition, 1990, pp 1694-1712; incorporated by reference). Those of skill in the art can readily determine the various parameters and conditions for producing aerosols without resort to undue experimentation.

[0151] The compounds, when it is desirable to deliver them systemically, may be formulated for parenteral administration by injection, e.g., by bolus injection or continuous infusion. Formulations for injection may be presented in unit dosage form, e.g., in ampoules or in multi-dose containers, with an added preservative. The compositions may take such forms as suspensions, solutions or emulsions in oily or aqueous vehicles, and may contain formulatory agents such as suspending, stabilizing and/or dispersing agents.

[0152] Preparations for parenteral administration include sterile aqueous or non-aqueous solutions, suspensions, and emulsions. Examples of non-aqueous solvents are propylene glycol, polyethylene glycol, vegetable oils such as olive oil, and injectable organic esters such as ethyl oleate. Aqueous carriers include water, alcoholic/aqueous solutions, emulsions or suspensions, including saline and buffered media. Parenteral vehicles include sodium chloride solution, Ringer's dextrose, dextrose and sodium chloride, lactated Ringer's, or fixed oils. Intravenous vehicles include fluid and nutrient replenishers, electrolyte replenishers (such as those based on Ringer's dextrose), and the like. Preservatives and other additives may also be present such as, for example, antimicrobials, anti-oxidants, chelating agents, and inert gases and the like. Lower doses will result from other forms of administration, such as intravenous administration. In the event that a response in a subject is insufficient at the initial doses applied, higher doses (or effectively higher doses by a different, more localized delivery route) may be employed to the extent that patient tolerance permits. Multiple doses per day are contemplated to achieve appropriate systemic levels of compounds.

[0153] In yet other embodiments, the preferred vehicle is a biocompatible microparticle or implant that is suitable for implantation into the mammalian recipient. Exemplary biodegradable implants that are useful in accordance with this method are described in PCT International Application No. PCT/US/03307 (Publication No. WO 95/24929, entitled “Polymeric Gene Delivery System”, claiming priority to U.S. patent application serial no. 213,668, filed Mar. 15, 1994). PCT/US/0307 describes a biocompatible, preferably biodegradable polymeric matrix for containing a biological macromolecule. The polymeric matrix may be used to achieve sustained release of the agent in a subject. In accordance with one aspect of the instant invention, the agent described herein may be encapsulated or dispersed within the biocompatible, preferably biodegradable polymeric matrix disclosed in PCT/US/03307. The polymeric matrix preferably is in the form of a microparticle such as a microsphere (wherein the agent is dispersed throughout a solid polymeric matrix) or a microcapsule (wherein the agent is stored in the core of a polymeric shell). Other forms of the polymeric matrix for containing the agent include films, coatings, gels, implants, and stents. The size and composition of the polymeric matrix device is selected to result in favorable release kinetics in the tissue into which the matrix device is implanted. The size of the polymeric matrix device further is selected according to the method of delivery which is to be used, typically injection into a tissue or administration of a suspension by aerosol into the nasal and/or pulmonary areas. The polymeric matrix composition can be selected to have both favorable degradation rates and also to be formed of a material which is bioadhesive, to further increase the effectiveness of transfer when the device is administered to a vascular, pulmonary, or other surface. The matrix composition also can be selected not to degrade, but rather, to release by diffusion over an extended period of time.

[0154] Both non-biodegradable and biodegradable polymeric matrices can be used to deliver the agents of the invention to the subject. Biodegradable matrices are preferred. Such polymers may be natural or synthetic polymers. Synthetic polymers are preferred. The polymer is selected based on the period of time over which release is desired, generally in the order of a few hours to a year or longer. Typically, release over a period ranging from between a few hours and three to twelve months is most desirable. The polymer optionally is in the form of a hydrogel that can absorb up to about 90% of its weight in water and further, optionally is cross-linked with multivalent ions or other polymers.

[0155] In general, the agents of the invention may be delivered using the biodegradable implant by way of diffusion, or more preferably, by degradation of the polymeric matrix. Exemplary synthetic polymers which can be used to form the biodegradable delivery system include: polyamides, polycarbonates, polyalkylenes, polyalkylene glycols, polyalkylene oxides, polyalkylene terepthalates, polyvinyl alcohols, polyvinyl ethers, polyvinyl esters, poly-vinyl halides, polyvinylpyrrolidone, polyglycolides, polysiloxanes, polyurethanes and co-polymers thereof, alkyl cellulose, hydroxyalkyl celluloses, cellulose ethers, cellulose esters, nitro celluloses, polymers of acrylic and methacrylic esters, methyl cellulose, ethyl cellulose, hydroxypropyl cellulose, hydroxy-propyl methyl cellulose, hydroxybutyl methyl cellulose, cellulose acetate, cellulose propionate, cellulose acetate butyrate, cellulose acetate phthalate, carboxylethyl cellulose, cellulose triacetate, cellulose sulphate sodium salt, poly(methyl methacrylate), poly(ethyl methacrylate), poly(butylmethacrylate), poly(isobutyl methacrylate), poly(hexylmethacrylate), poly(isodecyl methacrylate), poly(lauryl methacrylate), poly(phenyl methacrylate), poly(methyl acrylate), poly(isopropyl acrylate), poly(isobutyl acrylate), poly(octadecyl acrylate), polyethylene, polypropylene, poly(ethylene glycol), poly(ethylene oxide), poly(ethylene terephthalate), poly(vinyl alcohols), polyvinyl acetate, poly vinyl chloride, polystyrene and polyvinylpyrrolidone.

[0156] Examples of non-biodegradable polymers include ethylene vinyl acetate, poly(meth)acrylic acid, polyamides, copolymers and mixtures thereof.

[0157] Examples of biodegradable polymers include synthetic polymers such as polymers of lactic acid and glycolic acid, polyanhydrides, poly(ortho)esters, polyurethanes, poly(butic acid), poly(valeric acid), and poly(lactide-cocaprolactone), and natural polymers such as alginate and other polysaccharides including dextran and cellulose, collagen, chemical derivatives thereof (substitutions, additions of chemical groups, for example, alkyl, alkylene, hydroxylations, oxidations, and other modifications routinely made by those skilled in the art), albumin and other hydrophilic proteins, zein and other prolamines and hydrophobic proteins, copolymers and mixtures thereof. In general, these materials degrade either by enzymatic hydrolysis or exposure to water in vivo, by surface or bulk erosion.

[0158] Bioadhesive polymers of particular interest include biodegradable hydrogels described by H. S. Sawhney, C. P. Pathak and J. A. Hubell in Macromolecules, 1993, 26, 581-587, the teachings of which are incorporated herein, polyhyaluronic acids, casein, gelatin, glutin, polyanhydrides, polyacrylic acid, alginate, chitosan, poly(methyl methacrylates), poly(ethyl methacrylates), poly(butylmethacrylate), poly(isobutyl methacrylate), poly(hexylmethacrylate), poly(isodecyl methacrylate), poly(lauryl methacrylate), poly(phenyl methacrylate), poly(methyl acrylate), poly(isopropyl acrylate), poly(isobutyl acrylate), and poly(octadecyl acrylate).

[0159] Other delivery systems can include time-release, delayed release or sustained release delivery systems. Such systems can avoid repeated administrations of the compound, increasing convenience to the subject and the physician. Many types of release delivery systems are available and known to those of ordinary skill in the art. They include polymer base systems such as poly(lactide-glycolide), copolyoxalates, polycaprolactones, polyesteramides, polyorthoesters, polyhydroxybutyric acid, and polyanhydrides. Microcapsules of the foregoing polymers containing drugs are described in, for example, U.S. Pat. No. 5,075,109. Delivery systems also include non-polymer systems that are: lipids including sterols such as cholesterol, cholesterol esters and fatty acids or neutral fats such as mono- di- and tri-glycerides; hydrogel release systems; silastic systems; peptide based systems; wax coatings; compressed tablets using conventional binders and excipients; partially fused implants; and the like. Specific examples include, but are not limited to: (a) erosional systems in which the platelet reducing agent is contained in a form within a matrix such as those described in U.S. Pat. Nos. 4,452,775, 4,675,189, and 5,736,152 and (b) diffusional systems in which an active component permeates at a controlled rate from a polymer such as described in U.S. Pat. Nos. 3,854,480, 5,133,974 and 5,407,686. In addition, pump-based hardware delivery systems can be used, some of which are adapted for implantation.

[0160] Therapeutic formulations of the compounds of the invention or other therapeutic may be prepared for storage by mixing a compounds of the invention having the desired degree of purity with optional pharmaceutically acceptable carriers, excipients or stabilizers (Remington's Pharmaceutical Sciences 16th edition, Osol, A. Ed. (1980)), in the form of lyophilized formulations or aqueous solutions. Acceptable carriers, excipients, or stabilizers are nontoxic to recipients at the dosages and concentrations employed, and include buffers such as phosphate, citrate, and other organic acids; antioxidants including ascorbic acid and methionine; preservatives (such as octadecyldimethylbenzyl ammonium chloride; hexamethonium chloride; benzalkonium chloride, benzethonium chloride; phenol, butyl or benzyl alcohol; alkyl parabens such as methyl or propyl paraben; catechol; resorcinol; cyclohexanol; 3-pentanol; and m-cresol); low molecular weight (less than about 10 residues) polypeptides; proteins, such as serum albumin, gelatin, or immunoglobulins; hydrophilic polymers such as polyvinylpyrrolidone; amino acids such as glycine, glutamine, asparagine, histidine, arginine, or lysine; monosaccharides, disaccharides, and other carbohydrates including glucose, mannose, or dextrins; chelating agents such as EDTA; sugars such as sucrose, mannitol, trehalose or sorbitol; salt-forming counter-ions such as sodium; metal complexes (e.g. Zn-protein complexes); and/or non-ionic surfactants such as TWEEN™, PLURONICS™ or polyethylene glycol (PEG).

[0161] The compounds of the invention may be administered directly to a cell or a subject, such as a human subject alone or with a suitable carrier. Alternatively, a peptide may be delivered to a cell in vitro or in vivo by delivering a nucleic acid that expresses the peptide to a cell. Various techniques may be employed for introducing nucleic acid molecules of the invention into cells, depending on whether the nucleic acid molecules are introduced in vitro or in vivo in a host. Such techniques include transfection of nucleic acid molecule-calcium phosphate precipitates, transfection of nucleic acid molecules associated with DEAE, transfection or infection with the foregoing viruses including the nucleic acid molecule of interest, liposome-mediated transfection, and the like.

[0162] The invention also relates to assays for identifying therapeutics and therapeutic courses of treatment. The presence of plant viral DNA in a tumor cell may be assessed, for instance, in order to determine an appropriate therapeutic regimen against the tumor. For example one method involves performing a physical analytical step on a biological sample of a subject, identifying the presence of plant virus in the biological sample based on the physical analytical step, and determining a course of treatment for the subject based on the presence of the plant virus. Another method involves identifying an anti-cancer agent, by performing a physical analytical step on a plant to determine a plant defense mechanism for preventing infection with a plant virus, identifying an association of the plant virus with a mammalian cancer, and selecting the plant defense mechanism as an anti-cancer agent for the mammalian cancer.

[0163] The expression of plant viral genes in the tumor cell is determined using methods known to the skilled artisan. The detection methods generally involve contacting a plant viral binding molecule with a sample in or from a subject or in an in vitro cell. Preferably, the sample is first harvested from the subject, although in vivo detection methods are also envisioned. The sample may include any body tissue or fluid that is suspected of harboring the cancer cells. For example, the cancer cells are commonly found in or around a tumor mass for solid tumors. The binding molecules are referred to herein as isolated molecules that selectively bind to plant viral DNA, such as DNA, RNA or antibodies.

[0164] In aspects of the invention pertaining to cancers, the subject is a human either suspected of having the cancer, or having been diagnosed with cancer. Methods for identifying subjects suspected of having cancer may include physical examination, subject's family medical history, subject's medical history, biopsy, or a number of imaging technologies such as ultrasonography, computed tomography, magnetic resonance imaging, magnetic resonance spectroscopy, or positron emission tomography. Diagnostic methods for cancer and the clinical delineation of cancer diagnoses are well known to those of skill in the medical arts.

[0165] As used herein, a tissue sample is tissue obtained from a tissue biopsy, a surgically resected tumor, or any other tumor cell mass removed from the body using methods well known to those of ordinary skill in the related medical arts. The phrase “suspected of being cancerous” as used herein means a cancer tissue sample believed by one of ordinary skill in the medical arts to contain cancerous cells. Methods for obtaining the sample from a biopsy include gross apportioning of mass, microdissection, laser-based microdissection, or other art-known cell-separation methods.

[0166] Because of the variability of the cell types in diseased-tissue biopsy material, and the variability in sensitivity of the predictive methods used, the sample size required for analysis may range from 1, 10, 50, 100, 200, 300, 500, 1000, 5000, 10,000, to 50,000 or more cells. The appropriate sample size may be determined based on the cellular composition and condition of the biopsy and the standard preparative steps for this determination and subsequent isolation of the nucleic acid for use in the invention are well known to one of ordinary skill in the art.

[0167] The methods may involve the steps of isolating nucleic acids from the sample and/or an amplification step. Typically, a nucleic acid comprising a sequence of interest can be obtained from a biological sample, more particularly from a sample comprising DNA (e.g. gDNA or cDNA) or RNA (e.g. mRNA). Release, concentration and isolation of the nucleic acids from the sample can be done by any method known in the art. Various commercial kits are available such as the High pure PCR Template Preparation Kit (Roche Diagnostics, Basel, Switzerland) or the DNA purification kits (PureGene, Gentra, Minneapolis, US). Other, well-known procedures for the isolation of DNA or RNA from a biological sample are also available (Sambrook et al., Cold Spring Harbor Laboratory Press 1989, Cold Spring Harbor, N.Y., USA; Ausubel et al., Current Protocols in Molecular Biology 2003, John Wiley & Sons).

[0168] When the quantity of the nucleic acid is low or insufficient for the assessment, the nucleic acid of interest may be amplified. Such amplification procedures can be accomplished by those methods known in the art, including, for example, the polymerase chain reaction (PCR), ligase chain reaction (LCR), nucleic acid sequence-based amplification (NASBA), strand displacement amplification, rolling circle amplification, T7-polymerase amplification, and reverse transcription polymerase reaction (RT-PCR).

[0169] Polymerase chain reaction (PCR) technology is practiced routinely by those having ordinary skill in the art and its uses in diagnostics are well known and accepted. Methods for practicing PCR technology are disclosed in “PCR Protocols: A Guide to Methods and Applications”, Innis, M. A., et al. Eds. Academic Press, Inc. San Diego, Calif. (1990) which is incorporated herein by reference. Applications of PCR technology are disclosed in “Polymerase Chain Reaction” Erlich, H. A., et al., Eds. Cold Spring Harbor Press, Cold Spring Harbor, N.Y. (1989) which is incorporated herein by reference. U.S. Pat. No. 4,683,202, U.S. Pat. No. 4,683,195, U.S. Pat. No. 4,965,188 and U.S. Pat. No. 5,075,216, which are each incorporated herein by reference describe methods of performing PCR. PCR technology allows for the rapid generation of multiple copies of DNA sequences by providing 5′ and 3′ primers that hybridize to sequences present in an RNA or DNA molecule, and further providing free nucleotides and an enzyme which fills in the complementary bases to the nucleotide sequence between the primers with the free nucleotides to produce complementary strand of DNA.

[0170] PCR primers can be designed routinely by those having ordinary skill in the art using sequence information. The mRNA or cDNA is combined with the primers, free nucleotides and enzyme following standard PCR protocols. The mixture undergoes a series of temperature changes. If the test gene transcript or cDNA generated therefrom is present, that is, if both primers hybridize to sequences on the same molecule, the molecule comprising the primers and the intervening complementary sequences will be exponentially amplified. The amplified DNA can be easily detected by a variety of well-known means. If no gene transcript or cDNA generated therefrom is present, no PCR product will be exponentially amplified.

[0171] PCR product may be detected by several well-known means. One method for detecting the presence of amplified DNA is to separate the PCR reaction material by gel electrophoresis and stain the gel with ethidium bromide in order to visual the amplified DNA if present. A size standard of the expected size of the amplified DNA is preferably run on the gel as a control.

[0172] In some instances, such as when unusually small amounts of RNA are recovered and only small amounts of cDNA are generated therefrom, it is desirable to perform a PCR reaction on the first PCR reaction product. The second PCR can be performed to make multiple copies of DNA sequences of the first amplified DNA. A nested set of primers are used in the second PCR reaction. The nested set of primers hybridize to sequences downstream of the 5′ primer and upstream of the 3′ primer used in the first reaction.

[0173] Branched chain oligonucleotide hybridization may be performed as described in U.S. Pat. No. 5,597,909, U.S. Pat. No. 5,437,977 and U.S. Pat. No. 5,430,138, which are each incorporated herein by reference. Northern blot analysis methods are well known by those having ordinary skill in the art and are described in Sambrook, J. et al., (1989) Molecular Cloning: A Laboratory Manual, Cold Spring Harbor Laboratory Press, Cold Spring Harbor, N.Y. Additionally, mRNA extraction, electrophoretic separation of the mRNA, blotting, probe preparation and hybridization are all well-known techniques that can be routinely performed using readily available starting material.

[0174] Hybridization methods for nucleic acids are well known to those of ordinary skill in the art (see, e.g. Molecular Cloning: A Laboratory Manual, J. Sambrook, et al., eds., Second Edition, Cold Spring Harbor Laboratory Press, Cold Spring Harbor, N.Y., 1989, or Current Protocols in Molecular Biology, F. M. Ausubel, et al., eds., John Wiley & Sons, Inc., New York). The nucleic acid molecules hybridize under stringent conditions to nucleic acid markers expressed in cancer cells. The tissue may be obtained from a subject or may be grown in culture.

[0175] In the assays of the invention, the presence of the plant virus may be indicative of a predisposition to cancer. As such, the discovery of the presence of a plant virus may lead to the recommendation for a particular therapeutic regimen to avoid development of a disease such as cancer. Additionally it may lead to a further analysis of the status of inflammation in the subject. It is believed that a triggering event such as the induction of inflammation may lead to the activation of a dormant virus and development of cancer.

[0176] The invention also includes articles, which refers to any one or collection of components. In some embodiments the articles are kits. The articles include pharmaceutical or diagnostic grade compounds of the invention in one or more containers. The article may include instructions or labels promoting or describing the use of the compounds of the invention. One kit includes a set of primers for detecting plant viruses, a reagent for processing the primers to detect plant viruses, and instructions for analyzing a human or animal biological sample to detect the presence of plant viruses using the set of primers and reagent.

[0177] In one embodiment, a kit comprises antibodies against the starvation markers being measured in a method of the invention. The kit may further comprise assay diluents, standards, controls and/or detectable labels. The assay diluents, standards and/or controls may be optimized for a particular sample matrix.

[0178] As used herein, “promoted” includes all methods of doing business including methods of education, hospital and other clinical instruction, pharmaceutical industry activity including pharmaceutical sales, and any advertising or other promotional activity including written, oral and electronic communication of any form, associated with compositions of the invention in connection with treatment of infections, cancer, and autoimmune disease.

[0179] “Instructions” can define a component of promotion, and typically involve written instructions on or associated with packaging of compositions of the invention. Instructions also can include any oral or electronic instructions provided in any manner.

[0180] Thus the agents described herein may, in some embodiments, be assembled into pharmaceutical or diagnostic or research kits to facilitate their use in therapeutic, diagnostic or research applications. A kit may include one or more containers housing the components of the invention and instructions for use. Specifically, such kits may include one or more agents described herein, along with instructions describing the intended therapeutic application and the proper administration of these agents. In certain embodiments agents in a kit may be in a pharmaceutical formulation and dosage suitable for a particular application and for a method of administration of the agents.

[0181] The kit may be designed to facilitate use of the methods described herein by physicians and can take many forms. Each of the compositions of the kit, where applicable, may be provided in liquid form (e.g., in solution), or in solid form, (e.g., a dry powder). In certain cases, some of the compositions may be constitutable or otherwise processable (e.g., to an active form), for example, by the addition of a suitable solvent or other species (for example, water or a cell culture medium), which may or may not be provided with the kit. As used herein, “instructions” can define a component of instruction and/or promotion, and typically involve written instructions on or associated with packaging of the invention. Instructions also can include any oral or electronic instructions provided in any manner such that a user will clearly recognize that the instructions are to be associated with the kit, for example, audiovisual (e.g., videotape, DVD, etc.), Internet, and/or web-based communications, etc. The written instructions may be in a form prescribed by a governmental agency regulating the manufacture, use or sale of pharmaceuticals or biological products, which instructions can also reflects approval by the agency of manufacture, use or sale for human administration.

[0182] The kit may contain any one or more of the components described herein in one or more containers. As an example, in one embodiment, the kit may include instructions for mixing one or more components of the kit and/or isolating and mixing a sample and applying to a subject. The kit may include a container housing agents described herein. The agents may be prepared sterilely, packaged in syringe and shipped refrigerated. Alternatively it may be housed in a vial or other container for storage. A second container may have other agents prepared sterilely. Alternatively the kit may include the active agents premixed and shipped in a syringe, vial, tube, or other container.

[0183] The following examples are provided to illustrate specific instances of the practice of the present invention and are not intended to limit the scope of the invention. As will be apparent to one of ordinary skill in the art, the present invention will find application in a variety of compositions and methods.

### EXAMPLES

### Example 1

### Detection of Plant Viral DNA in Human Bladder Cancer Cells

[0184] Methods:

[0185] Genomic DNA was extracted from T-24 human bladder cells using the Qiagen DNeasy Blood and Tissue Kit (Cat#69504) according to the manufacturer's directions. 1 μg of DNA, 1 μL of 10 μM forward primer (table below), and 1 μL of 10 μM reverse primer (table below), were used with the USB Taq PCR Master Mix Plus Kit according to the manufacturer's directions. Using a BioRad iCycler thermo cycler, 30 cycles of 1 min at 940 C, 1 min 520 C, 1 min at 720 C. Finally one 10 min elongation at 720 C was performed. PCR products were run on a polyacrylamide gel and analyzed on a Licor Odyssey Infrared Imager.

[0186] The following primers corresponding to SEQ ID NOs:486-493 were used in the study:

[chemical structure]

[0187] Results: PCR was performed on T24 bladder cancer cell DNA using TMV primers to detect the presence of plant viral DNA. The data is shown in FIG. 1. FIG. 1 is a blot of a genomic DNA PCR analysis. Gnomic DNA from T-24 human bladder cancer cell line was amplified using 4 primer sets specific for amplifying tobacco mosaic virus (TMV). Lane 1. 1/1000 BP size markers. Lane 2. Genomic DNA amplified with TMV primer 1. Lane 3. Genomic DNA amplified with TMV primer 3. Lane 4. Genomic DNA amplified with TMV primer 6. Lane 5. Genomic DNA amplified with TMV primer 8. Foreword and reverse primer sequences can be found in the table above. As shown in FIG. 1, TMV DNA is present in T24 bladder cancer cell DNA samples.

### Example 2

### Effect of Anti-Viral Compound on Human Bladder Cancer Cells

[0188] Methods:

[0189] T-24 Efavirenz Culture:

[0190] T-24 human bladder cells were grown in a 12 well plate in a total volume of 2 mL of 10% FBS complete RPMI. Cells were left untreated or treated with 2 μL of methanol (Sigma-Aldrich) or treated with 10 μM efavirenz (Toronto Research Chemicals Cat# E425000). Cells were grown in CO₂ incubator at 37° C. for 48 hours. After 48 hours, cells were harvested and counted using trypan blue on a hemocytometer.

[0191] MitoTracker Red:

[0192] Mitochondrial membrane potential was assessed using Mitotracker Red (CM-H₂XROS, Invitrogen). The cells were resuspended in warm (37° C. PBS containing a final concentration of 0.5 μM dye. The cells were incubated for 20 minutes, pelleted, and resuspended in PBS for analysis.

[0193] Results:

[0194] The human bladder cancer T24 cell line was used to determine the effects of and anti-viral treatment on human tumor cells infected with plant virus. The T24 cells were grown in culture and then treated or not with the anti-reverse transcriptase drug, efavirenz, for twenty four or forty eight hours. Cell death assays were performed in triplicate. Efavirenz was effective in killing a percentage of the cells, presumably the subset of the population that are producing viruses or reverse transcribing. It is expected that treatment of the bladder cancer cells with a TLR activator to activate new virus replication in combination with the anti-viral drug will be useful in increasing cell death further. FIG. 2a depicts flow cytometer results on T-24 Human bladder cancer cells treated with efavirenz or methanol control for 48 hours. FIG. 2b is a bar graph depiction of the data.

### Example 3

### TLR Activation Results in Transcription of the Integrated Viral Genes in Several of the Human Bladder Cancer Cells

[0195] Methods:

[0196] Total RNA was extracted from T-24 human bladder cells and C57B/6 mouse splenocytes using the Qiagen RNeasy Minit Kit (Cat#74104) according to the manufacturer's directions. cDNA was synthesized with the BioRad iScript cDNA Synthesis Kit (1708891) using a BioRad iCycler thermo cycler according to the manufacturer's directions. The following primer sets were used with iTaq SYBER Green Super Mix with ROX (BioRad 172-5850) on an Agilent Technologies Stratagene Mx3005P real time PCR machine.

[0197] Primer sets were used according to Zhou, X. et al. Complete nucleotide sequence and genome organization of tobacco mosaic virus isolated from Vicia faba. Sci. China C Life Sci. 2000 Vol. 43 No. 2.

[0198] The primers corresponding to SEQ ID NOs:494-507, 233 and 344 are presented below:

[chemical structure]

[0199] Results:

[0200] The impact of TLR activation on viral gene transcription in a human bladder cancer cell was examined. The results are shown in FIG. 3. A series of bar graphs depicting the results of the PCR assays using primers 1-8 are shown. The following conditions were used: 3a is CpG treated spleen cells, 3b is untreated T24 cells, 3c is CpG treated T24 cells; 3d is LPS treated T24 cells, 3e is CpG+efavirenz treated T24, and 3f is LPS+efavirenz treated T24. The results demonstrate that TLR activation, particularly CpG causes increased transcription of at least one of the integrated viral genes in human bladder cancer cells. In particular, primer 8 showed increased expression in T24 cells.

### Example 4

### Sequence Alignment

[0201] Methods:

[0202] Using the software package ClustalX 2.1, the protein sequences from tobacco mosaic virus (TMV), pepper mild mottled virus (PMMV), rice grassy stunt virus (RGSV), cauliflower mosaic virus (CMV), and banana bunchy top virus (BBTV) were aligned with protein sequences of either known anti-apoptotic proteins from other viruses or human proteins associated with cell death pathways. Homologies are indicated by the bar graphs below the sequence information and indicate significant relationships.

[0203] Results:

[0204] The ClustalX 2.1 alignment of plant virus protein sequences versus known viruses was generated and the results are shown in FIGS. 4-6. Specifically the ClustalX 2.1 alignment of plant virus protein sequences versus viral anti-apoptotic protein sequences is shown in FIG. 4. The ClustalX 2.1 Alignment of Plant Virus Protein Sequences vs. Human Proteins from Cell Death Pathways is shown in FIGS. 5A & 5B. The ClustalX 2.1 alignment of HIV versus Banana Bunchy Top Virus (BBTV) is shown in FIG. 6.

[0205] The sequence alignments show striking homology between a number of plant viruses and mammalian viruses, suggesting a possible common origin. The high sequence homology provides a guide for selecting the appropriate plant viral vaccine or anti-viral strategy for a particular disease. Interestingly, the significant homology between HIV and Banana bunchy top virus (BBTV), suggests the use of a new plant viral vaccine for the treatment of HIV infection. The BBTV may be used as a prophylactic or therapeutic vaccine for the treatment of HIV infection.

### Example 5

### Sequences and Accession Numbers for Plant Viral Peptides Tobacco Mosaic Virus Protein Sequence

| | | SEQ | |
|---|---|---|---|
| Protein | | ID | |
| Name | Accession # | NO. | Sequence |
| Coat | NP_597750.1 | 1 | SYSITTPSQFVFLSSAWADPIELINLCTNALGNQFQTQQARTVVQRQFSEVWKPSPQVTVRFP |
| Protein | | | DSDFKVYRYNAVLDPLVTALLGAFDTRNRIIEVENQANPTTAETLDATRRVDDATVAIRSAI |
| | | | NNLIVELIRGTGSY NRSSFESSSGLVWTSGPAT |
| Replicase | NP_597746.1 | 2 | AYTQTATTSALLDTVRGNNSLVNDLAKRRLYDTAVEEFNARDRRPKVNFSKVISEEQTLIAT |
| | | | RAYPEFQITFYNTQNAVHSLAGGLRSLELEYLMMQIPYGSLTYDIGGNFASHLFKGRAYVH |
| | | | CCMPNLDVRDIMRHEGQKDSIELYLSRLERGGKTVPNFQKEAFDRYAEIPEDAVCHNTFQT |
| | | | MRHQPMQQSGRVYAIALHSIYDIPADEFGAALLRKNVHTCYAAFHFSENLLLEDSYVNLDEI |
| | | | NACFSRDGDKLTFSFASESTLNYCHSYSNILKYVCKTYFPASNREVYMKEFLVTRVNTWFC |
| | | | KFSRIDTFLLYKGVAHKSVDSEQFYTAMEDAWHYKKTLAMCNSERILLEDSSSVNYWFPK |
| | | | MRDMVIVPLFDISLETSKRTRKEVLVSKDFVFTVLNHIRTYQAKALTYANVLSFVESIRSRVII |
| | | | NGVTARSEWDVDKSLLQSLSMTFYLHTKLAVLKDDLLISKFSLGSKTVCQHVWDEISLAFG |
| | | | NAFPSVKERLLNRKLIRVAGDALEIRVPDLYVTFHDRLVTEYKASVDMPALDIRKKMEETE |
| | | | VMYNALSELSVLRESDKFDVDVFSQMCQSLEVDPMTAAKVIVAVMSNESGLTLTFERPTEA |
| | | | NVALALQDQEKASEGALVVTSREVEEPSMKGSMARGELQLAGLAGDHPESSYSKNEEIESL |
| | | | EQFHMATADSLIRKQMSSIVYTGPIKVQQMKNFIDSLVASLSAAVSNLVKILKDTAAIDLETR |
| | | | QKFGVLDVASRKWLIKPTAKSHAWGVVETHARKYHVALLEYDEQGVVTCDDWRRVAVSS |
| | | | ESVVYSDMAKLRTLRRLLRNGEPHVSSAKVVLVDGVPGCGKTKEILSRVNFDEDLILVPGK |
| | | | QAAEMIRRRANSSGIIVATKDNVKTVDSFMMNFGKSTRCQFKRLFIDEGLMLHTGCVNFLV |
| | | | AMSLCEIAYVYGDTQQIPYINRVSGFPYPAHFAKLEVDEVETRRTTLRCPADVTHYLNRRYE |
| | | | GFVMSTSSVKKSVSQEMVGGAAVINPISKPLHGKILTFTQSDKEALLSRGYSDVHTVHEVQG |
| | | | ETYSDVSLVRLTPTPVSIIAGDSPHVLVALSRHTCSLKYYTVVMDPLVSIIRDLEKLSSYLLD |
| | | | MYKVDAGTQXQLQIDSVFKGSNLFVAAPKTGDISDMQFYYDKCLPGNSTMMNNFDAVTM |
| | | | RLTDISLNVKDCILDMSKSVAAPKDQIKPLIPMVRTAAEMPRQTGLLENLVAMIKRNFNAPE |
| | | | LSGIIDIENTASLVVDKFFDSYLLKEKRKPNKNVSLFSRESLNRWLEKQEQVTIGQLADFDFV |
| | | | DLPAVDQYRHMIKAQPKQKLDTSIQTEYPALQTIVYHSKKINAIFGPLFSELTRQLLDSVDSS |
| | | | RFLFFTRKTPAQIEDFFGDLDSHVPMDVLELDISKYDKSQNEFHCAVEYEIWRRLGFEDFLG |
| | | | EVWKQGHRKTTLKDYTAGIKTCIWYQRKSGDVTTFIGNTVIIAACLASMLPMEKIIKGAFCG |
| | | | DDSLLYFPKGCEFPDVQHSANLMWNFEAKLFKKQYGYFCGRYVIHHDRGCIVYYDPLKLIS |
| | | | KLGAKHIKDWEHLEEFRRSLCDVAVSLNNCAYYTQLDDAVWEVHKTAPPGSFVYKSLVKY |
| | | | LSDKVLFRSLFIDGSSC |
| RNA | NP_597747.1 | 3 | QFYYDKCLPGNSTMMNNFDAVTMRLTDISLNVKDCILDMSKSVAAPKDQIKPLIPMVRTAA |
| Polymerase | | | EMPRQTGLLENLVAMIKRNFNAPELSGIIDIENTASLVVDKFFDSYLLKEKRKPNKNVSLFSR |
| | | | ESLNRWLEKQEQVTIGQLADFDFVDLPAVDQYRHMIKAQPKQKLDTSIQTEYPALQTIVYH |
| | | | SKKINAIFGPLFSELTRQLLDSVDSSRFLFFTRKTPAQIEDFFGDLDSHVPMDVLELDISKYDK |
| | | | SQNEFHCAVEYEIWRRLGFEDFLGEVWKQGHRKTTLKDYTAGIKTCIWYQRKSGDVTTFIG |
| | | | NTVIIAACLASMLPMEKIIKGAFCGDDSLLYFPKGCEFPDVQHSANLMWNFEAKLFKKQYG |
| | | | YFCGRYVIHHDRGCIVYYDPLKLISKLGAKHIKDWEHLEEFRRSLCDVAVSLNNCAYYTQL |
| | | | DDAVWEVHKTAPPGSFVYKSLVKYLSDKVLFRSLFIDGSSC |
| Movement | NP_597748.1 | 4 | ALVVKGKVNINEFIDLTKMEKILPSMFTPVKSVMCSKVDKIMVHENESLSEVNLLKGVKLID |
| Protein | | | SGYVCLAGLVVTGEWNLPDNCRGGVSVCLVDKRMERADEATLGSYYTAAAKKRFQFKVV |
| | | | PNYAITTQDAMKNVWQVLVNIRNVKMSAGFCPLSLEFVSVCIVYRNNIKLGLREKITNVRD |
| | | | GGPMELTEEVVDEFMEDVPMSIRLAKFRSRTGKKSDVRKGKNSSNDRSVPNKNYRNVKDF |
| | | | GGMSFKKNNLIDDDSEATVAESDSF |
| Charged | NP_597749.1 | 5 | MIRRLLSPNRIRFKYVLQYHYSISVRVLVISVGRPNRVN |
| Protein | | | |

[0207] TMV Examplary Peptides:

| Amino | | SEQ ID |
|---|---|---|
| Acid number | Sequence | NO. |
| 1-11 | acetyl-SYSITTPSQFV(GK)^{a} | 6 |
| 19-32 | (KG)DPIELINLCTNALG^{a} | 7 |
| 18-25 | ADPIELIN | 8 |
| 22-29 | ELINLCTN | 9 |
| 27-33 | CTNALGN | 10 |
| 28-42 | TNALGNQFQTQQART | 11 |
| 34-39 | QFQTQQ | 12 |
| 39-51 | QARTVVQRQFSEV | 13 |
| 53-74 | KPSPQVTVRFPDSDFKVYRYNA | 14 |
| 61-74 | RFPDSDFKVYRYNA | 15 |
| 72-77 | YNAVLD | 16 |
| 76-88 | (KG)LDPLVTALLGAFD^{a} | 17 |
| 90-117 | RNRIIEVENQANPTTAETLDATRRVDDA | 18 |
| 95-117 | EVENQANPTTAETLDATRRVDDA | 19 |
| 115-134 | DDATVAIRSAINNLIVELIR | 20 |
| 129-134 | IVELIR | 21 |
| 134-146 | RGTGSYNRSSFES | 22 |
| 142-147 | SSFESS | 23 |
| 149-158 | GLVWTSGPAT | 24 |

A: alanine;
R: arginine;
D: aspartic acid;
N: asparagine;
C: cysteine;
E: glutamic acid;
Q: glutamine;
G: glycine;
I: isoleucine;
L: leucine;
K: lysine;
F: phenylalanine;
P: proline;
S: serine;
T: threonine;
W: tryptophan;
Y: tyrosine;
V: valine.
sequence (KG) raises the hydrophilicity of particularly hydrophobic peptides.

[0208] Relicase 1a

| HLADRB1*0101 | Predicted −logIC50 | Predicted IC50 | Confidence of | |
|---|---|---|---|---|
| Amino acid groups | (M) | Value (nM) | prediction (Max = 1) | SEQ ID NO |
| FDEDLILVP | 9.234 | 0.58 | 0.33 | 25 |
| YLHTKLAVL | 9.22 | 0.6 | 0.38 | 26 |
| FIDSLVASL | 9.154 | 0.7 | 0.38 | 27 |
| FYLHTKLAV | 9.116 | 0.77 | 0.29 | 28 |
| RVYAIALHS | 9.101 | 0.79 | 0.29 | 29 |
| HLADRB*0401 | Predicted −logIC50 | Predicted IC50 | Confidence of | |
| Amino acid groups | (M) | Value (nM) | prediction (Max = 1) | SEQ ID NO |
| VSSAKVVLV | 7.403 | 39.54 | 0.38 | 30 |
| VRGNNSLVN | 7.379 | 41.78 | 0.38 | 31 |
| DSLVASLSA | 7.327 | 47.1 | 0.33 | 32 |
| VSGFPYPAH | 7.263 | 54.58 | 0.33 | 33 |
| FSQMCQSLE | 7.242 | 57.28 | 0.29 | 34 |
| HLADRB*0701 | Predicted −logIC50 | Predicted IC50; | Confidence of | |
| Amino acid groups | (M) | Value (nM) | prediction (Max = 1) | SEQ ID NO |
| GAALLRKNV | 8.036 | 9.2 | 0.38 | 35 |
| IIVATKDNV | 7.858 | 13.87 | 0.38 | 36 |
| AKVIVAVMS | 7.738 | 18.28 | 0.38 | 37 |
| YVNLDEINA | 7.714 | 19.32 | 0.33 | 38 |
| EFLVTRVNT | 7.679 | 20.94 | 0.38 | 39 |

[0209] RNA Polymerase

| HLADRB1*0101 | Predicted −logIC50 | Predicted IC50 | Confidence of | |
|---|---|---|---|---|
| Amino acid groups | (M) | Value (nM) | prediction (Max = 1) | SEQ ID NO |
| YYDPLKLIS | 9.635 | 0.23 | 0.33 | 40 |
| FVDLPAVDQ | 9.034 | 0.92 | 0.33 | 41 |
| FFDSYLLKE | 9.034 | 0.92 | 0.38 | 42 |
| DIENTASLV | 8.993 | 1.02 | 0.29 | 43 |
| YYTQLDDAV | 8.989 | 1.03 | 0.29 | 44 |
| HLADRB*0401 | Predicted −logIC50 | Predicted IC50 | Confidence of | |
| Amino acid groups | (M) | Value (nM) | prediction (Max = 1) | SEQ ID NO |
| KVLFRSLFI | 7.378 | 41.88 | 0.33 | 45 |
| VYYDPLKLI | 7.366 | 43.05 | 0.38 | 46 |
| WYQRKSGDV | 7.285 | 51.88 | 0.33 | 47 |
| VDLPAVDQY | 7.28 | 52.48 | 0.29 | 48 |
| PRQTGLLEN | 7.24 | 57.54 | 0.29 | 49 |
| HLADRB*0701 | Predicted −logIC50 | Predicted IC50 | Confidence of | |
| Amino acid groups | (M) | Value (nM) | prediction (Max = 1) | SEQ ID NO |
| FIGNTVIIA | 8.002 | 9.95 | 0.38 | 50 |
| PMVRTAAEM | 7.616 | 24.21 | 0.29 | 51 |
| YPALQTIVY | 7.482 | 32.96 | 0.38 | 52 |
| RQLLDSVDS | 7.46 | 34.67 | 0.33 | 53 |

[0210] Charged Protein

| HLADRB1*0101 | Predicted −logIC50 | Predicted IC50 | Confidence of | |
|---|---|---|---|---|
| Amino acid groups | (M) | Value (nM) | prediction (Max = 1) | SEQ ID NO |
| MIRRLLSPN | 8.644 | 2.27 | 0.33 | 54 |
| SISVRVLVI | 8.336 | 4.61 | 0.33 | 55 |
| FKYVLQYHY | 8.226 | 5.94 | 0.33 | 56 |
| QYHYSISVR | 8.103 | 7.89 | 0.38 | 57 |
| MMIRRLLSP | 8.015 | 9.66 | 0.29 | 58 |
| HLADRB*0401Amino | Predicted −logIC50 | Predicted IC50 | Confidence of | |
| acid groups | (M) | Value (nM) | prediction (Max = 1) | SEQ ID NO |
| RVLVISVGR | 7.126 | 74.82 | 0.33 | 59 |
| YVLQYHYSI | 6.884 | 130.62 | 0.33 | 60 |
| RIRFKYVLQ | 6.626 | 236.59 | 0.29 | 61 |
| YHYSISVRV | 6.605 | 248.31 | 0.38 | 62 |
| YSISVRVLV | 6.604 | 248.89 | 0.38 | 63 |
| HLADRB*0701Amino | Predicted −logIC50 | Predicted IC50 | Confidence of | |
| acid groups | (M) | Value (nM) | prediction (Max = 1) | SEQ ID NO |
| KYVLQYHYS | 7.45 | 35.48 | 0.38 | 64 |
| IRRLLSPNR | 7.231 | 58.75 | 0.38 | 65 |
| YSISVRVLV | 7.007 | 98.4 | 0.38 | 66 |
| VRVLVISVG | 6.881 | 131.52 | 0.38 | 67 |
| LLSPNRIRF | 6.876 | 133.05 | 0.38 | 68 |

[0211] CaMV Proteins:

[0212] Cauliflower mosaic virus peptides obtained from UniPro (with UniPro accession number; http://www.uniprot.org/uniprot):

| Accession # | Protein names | Seq | |
|---|---|---|---|
| Entry | Gene names | ID | |
| name | Organism | NO | Sequence |
| P03551 | Virion-associated protein | 69 | MANLNQIQKE VSEILSDQKS MKADIKAILE LLGSQNPIKE SLETVAAKIV |
| VAP_CAMVS | ORF III | | NDLTKLINDC PCNKEILEAL GTQPKEQLIE QPKEKGKGLN LGKYSYPNYG |
| | Cauliflower mosaic virus | | VGNEELGSSG NPKALTWPFK APAGWPNQF |
| | (strain Strasbourg) (CaMV) | | |
| P03545 | Movement protein | 70 | MDLYPEENTQ SEQSQNSENN MQIFKSENSD GFSSDLMISN DQLKNISKTQ |
| MVP_CAMVS | ORF I | | LTLEKEKIFK MPNVLSQVMK KAFSRKNEIL YCVSTKELSV DIHDATGKVY |
| | Cauliflower mosaic virus | | LPLITKEEIN KRLSSLKPEV RKTMSMVHLG AVKILLKAQF RNGIDTPIKI |
| | (strain Strasbourg) (CaMV) | | ALIDDRINSR RDCLLGAAKG NLAYGKFMFT VYPKFGISLN TQRLNQTLSL |
| | | | IHDFENKNLM NKGDKVMTIT YVVGYALTNS HHSIDYQSNA TIELEDVFQE |
| | | | IGNVQQSEFC TIQNDECNWA IDIAQNKALL GAKTKTQIGN NLQIGNS ASS |
| | | | SNTENELARV SQNIDLLKNK LKEICGE |
| P03542 | Capsid protein | 71 | MAESILDRTI NRFWYNLGED CLSESQFDLM IRLMEESLDG DQIIDLTSLP |
| CAPSD_CAMVS | ORF IV | | SDNLQVEQVM TTTEDSISEE ESEFLLAIGE TSEEESDSGE EPEFEQVRMD |
| | Cauliflower mosaic virus | | RTGGTEIPKE EDGEGPSRYN ERKRKTPEDR YFPTQPKTIP GQKQTSMGML |
| | (strain Strasbourg) (CaMV) | | NIDCQTNRRT LIDDWAAEIG LIVKTNREDY LDPETILLLM EHKTSGIAKE |
| | | | LIRNTRWNRT TGDIIEQVID AMYTMFLGLN YSDNKVAEKI DEQEKAKIRM |
| | | | TKLQLCDICY LEEFTCDYEK NMYKTELADF PGYINQYLSK IPIIGEKALT |
| | | | RFRHEANGTS IYSLGFAAKI VKEELSKICD LSKKQKKLKK FNKKCCSIGE |
| | | | ASTEYGCKKT STKKYHKKRY KKKYKAYKPY KKKKKFRSGK |
| | | | YFKPKEKKGS KQKYCPKGKK DCRCWICNIE GHYANECPNR QSSEKAHILQ |
| | | | QAEKLGLQPI EEPYEGVQEV FILEYKEEEE ETSTEESDGS STSEDSDSD |
| P03554 | Enzymatic polyprotein | 72 | MDHLLLKTQT QTEQVMNVTN PNSIYIKGRL YFKGYKKIEL HCFVDTGASL |
| POL_CAMVS | ORF V | | CIASKFVIPE EHWVNAERPI MVKIADGSSI TISKVCKDID LIIAGEIFRI |
| | Cauliflower mosaic virus | | PTVYQQESGI DFIIGNNFCQ LYEPFIQFTD RVIFTKNKSY VHIAKLTRA |
| | (strain Strasbourg) (CaMV) | | VRVGTEGFLE SMKKRSKTQQ PEPVNISTNK IENPLEEIAI LSEGRRLSEE |
| | | | KLFITQQRMQ KIEELLEKVC SENPLDPNKT KQWMKASIKL SDPSKAIKVK |
| | | | PMKYSPMDRE EFDKQIKELL DLKVIKPSKS PHMAPAFLVN NEAEKRRGKK |
| | | | RMVVNYKAMN KATVGDAYNL PNKDELLTLI RGKKIFSSFD CKSGFWQVLL |
| | | | DQESRPLTAF TCPQGHYEWN VVPFGLKQAP SIFQRHMDEA FRVFRKFCCV |
| | | | YVDDILVFSN NEEDHLLHVA MILQKCNQHG IILSKKKAQL FKKKINFLGL |
| | | | EIDEGTHKPQ GHILEHINKF PDTLEDKKQL QRFLGILTYA SDYIPKLAQI |
| | | | RKPLQAKLKE NVPWRWTKED TLYMQKVKKN LQGFPPLHHP LPEEKLIIET |
| | | | DASDDYWGGM LKAIKINEGT NTELICRYAS GSFKAAEKNY HSNDKETLAV |
| | | | INTIKKFSIY LTPVHFLIRT DNTHFKSFVN LNYKGDSKLG RNIRWQAWLS |
| | | | HYSFDVEHIK GTDNHFADFL SREFNKVNS |
| P03559 | Transactivator/viroplasmin | 73 | MENIEKLLMQ EKILMLELDL VRAKISLARA NGSSQQGDLS LHRETPEKEE |
| IBMP_CAMVS | protein | | AVHSALATFT PSQVKAIPEQ TAPGKESTNP LMANILPKDM NSVQTEIRPV |
| | ORF VI | | KPSDFLRPHQ GIPIPPKPEP SSSVAPLRDE SGIQHPHTNY YVVYNGPHAG |
| | Cauliflower mosaic virus (strain | | IYDDWGCTKA ATNGVPGVAH KKFATITEAR AAADAYTTSQ QTDRLNFIPK |
| | Strasbourg) (CaMV) | | GEAQLKPKSF AKALTSPPKQ KAHWLMLGTK KPSSDPAPKE ISFAPEITMD |
| | | | DFLYLYDLVR KFDGEGDDTM FTTDNEKISL FNFRKNANPQ MVREAYAAGL |
| | | | IKTIYPSNNL QEIKYLPKKV KDAVKRFRTN CIKNTEKDIF LKIRSTIPVW |
| | | | TIQGLLHKPR QVIEIGVSKK VVPTESKAME SKIQIEDLTE LAVKTGEQFI |
| | | | QSLLRLNDKK KIFVNMVEHD TLVYSKNIKD TVSEDQRAIE TFQQRVISGN |
| | | | LLGFHCPAIC HFIVKIVEKE GGSYKCHHCD KGKAIVEDAS ADSGPKDGPP |
| | | | PTRSIVEKED VPTTSSKQVD |
| Q02954 | Transactivator/viroplasmin | 74 | MENIEKLLMQ EKILMLELDL VRAKISLARA NGSSQQGDLS LHRETPVKEE |
| IBMP_CAMVE | protein | | AVHSALATFT PTQVKAIPEQ TAPGKESTNP LMASILPKDM NPVQTGIRLA |
| | ORF VI | | VPGDFLRPHQ GIPIPQKSEL SSTVVPLRDE SGIQHPHINY YVVYNGPHAG |
| | Cauliflower mosaic virus (strain | | IYDDWGCTKA ATNGVPGVAH KKFATITEAR AAADAYTTSQ QTDRLNFIPK |
| | BBC) (CaMV) | | GEAQLKPKSF REALTSPPKQ KAHWLTLGTK RPSSDPAPKE ISFAPEITMD |
| | | | DFLYLYDLGR KFDGEGDDTM FTTDNEKISL FNFRKNADPQ MVREAYAAGL |
| | | | IKTIYPSNNL QEIKYLPKKV KDAVKRFRTN CIKNTEKDIF LKIRSTIPVW |
| | | | TIQGLLHKPR QVIEIGVSKK VVPTESKAME SKIQIEDLTE LAVKTGEQFI |
| | | | QSLLRLNDKK KIFVNMVEDD TLVYSKNIKD TVSEDQRAIE TFQQRVISGN |
| | | | LLGFHCPAIC HFIERTVEKE GGSYKVHHCD KGKAIVQDAS ADSGPKDGPP |
| | | | PTRSIVEKED VPTTSSKQVD |
| P03546 | Movement protein | 75 | MDLYPEENTQ SEQSQNSENN MQIFKSENSD GFSSDLMISN DQLKNISKTQ |
| MVP_CAMVC | ORF I | | LTLEKEKIFK MPNVLSQVMK KAFSRKNEIL YCVSTKELSV DIHDATGKVY |
| | Cauliflower mosaic virus (strain | | LPLITREEIN KRLSSLKPEV RKIMSMVHLG AVKILLKAQF RNGIDTPIKI |
| | CM-1841) (CaMV) | | ALIDDRINSR RDCLLGAAKG NLAYGKFMFT VYPKFGISLN TQRLNQTLSL |
| | | | IHDFENKNLM NKGDKVMTIT YIVGYALTNS HHSIDYQSNA TIELEDVFQE |
| | | | IGNVQQSDFC TIQNDECNWA IDIAQNKALL GAKTQSQIGN SLQIGNSASS |
| | | | SNTENELARV SQNIDLLKNK LKEICGE |
| P16666 | Transactivator/viroplasmin | 76 | MEDIEKLLLQ EKILMLELDL VRAKISLARA KGSMQQGGNS LHRETPVKEE |
| IBMP_CAMVB | protein | | AVHSALATFA PIQAKAIPEQ TAPGKESTNP LMVSILPKDM KSVQTEKKRL |
| | ORF VI | | VTPMDFLRPN QGIQIPQKSE PNSSVAPNRA ESGIQHPHSN YYVVYNGPHA |
| | Cauliflower mosaic virus (strain | | GIYDDWGSAK AATNGVPGVA HKKFATITEA RAAADVYTTA QQAERLNFIP |
| | Bari 1) (CaMV) | | KGEAQLKPKS FVKALTSPPK QKAQWLTLGV KKPSSDPAPK EVSFDQETTM |
| | | | DDFLYLYDLG RRFDGEGDDT VFTTDNESIS LFNFRKNANP EMIREAYNAG |
| | | | LIRTIYPSNN LQEIKYLPKK VKDAVKKFRT NCIKNTEKDI FLKIKSTIPV |
| | | | WQDQGLLHKP KHVIEIGVSK KIVPKESKAM ESKDHSEDLI ELATKTGEQF |
| | | | IQSLLRLNDK KKIFVNLVEH DTLVYSKNTK ETVSEDQRAI ETFQQRVITP |
| | | | NLLGFHCPSI CHFIKRTVEK EGGAYKCHHC DKGKAIVQDA SADSKVADKE |
| | | | GPPLTTNVEK EDVSTTSSKA SG |
| P03558 | Transactivator/viroplasmin | 77 | MENIEKLLMQ EKILMLELDL VRAKISLARA NGSSQQGDLP LHRETPVKEE |
| IBMP_CAMVC | protein | | AVHSALATFT PTQVKAIPEQ TAPGKESTNP LMASILPKDM NPVQTGIRLA |
| | ORF VI | | VPGDFLRPHQ GIPIPQKSEL SSIVAPLRAE SGIHHPHINY YVVYNGPHAG |
| | Cauliflower mosaic virus (strain | | IYDDWGCTKA ATNGVPGVAY KKFATITEAR AAADAYTTSQ QTDRLNFIPK |
| | CM-1841) (CaMV) | | GEAQLKPKSF AKALTSPPKQ KAHWLTLGTK RPSSDPAPKE ISFAPEITMD |
| | | | DFLYLYDLGR KFDGEGDDTM FTTDNEKISL FNFRKNADPQ MVREAYAAGL |
| | | | IKTIYPSNNL QEIKYLPKKV KDAVKRFRTN CIKNTEKDIF LKIRSTIPVW |
| | | | TIQGLLHKPR QVIEIGVSKK VVPTESKAME SKIQIEDLTE LAVKTGEQFI |
| | | | QSLLRLNDKK KIFVNMVEHD TLVYSKNIKD TVSEDQRAIE TFQQRVISGN |
| | | | LLGFHCPAIC HFIKRTVEKE GGTYKCHHCD KGKAIVQDAS ADSGPKDGPP |
| | | | PTRSIVEKED VPTTSSKQVD |
| P03557 | Transactivator/viroplasmin | 78 | MENIEKLLMQ EKILMLELDL VRAKISLARA NGSSQQGELS LHRETPEKEV |
| IBMP_CAMVD | protein | | AVHSALVTFT PTQVKAIPEQ TAPGKESTNP LMASILPKDM NPVQTGTRLA |
| | ORF VI | | VPSDFLRPHQ GIPIPQKSEL SSTVVPLRAE SGIQHPHINY YVVYNGPHAG |
| | Cauliflower mosaic virus (strain | | IYDDWGCTKA ATNGVPGVAH KKFATITEAR AAADAYTTRQ QTDRLNFIPK |
| | D/H) (CaMV) | | GEAQLKPKSF AEALTSPPKQ KAHWLTLGTK KPSSDPAPKE ISFAPEITMD |
| | | | DFLYLYDLVR KFDGEGDDTM FTTDNEKISL FNFRKNANPQ MVREAYAAGL |
| | | | IKTIYPSNNL QEIKYLPKKV KDAVKRFRTN CIKNTEKDIF LKIRSTIPVW |
| | | | TIQGLLHKPR QVIEIGVSKK VIPTESKAME SRIQIEDLTE LAVKTGEQFI |
| | | | QSLLRLNDKK KIFVNMVEHD TLVYSKNIKE TDSEDQRAIE TFQQRVISGN |
| | | | LLGFHCPAIC HFIMKTVEKE GGAYKCHHCD KGKAIVQDAS ADEGTTDKSG |
| | | | PPPTRSIVEK EDVPNTSSKQ VD |
| P13218 | Transactivator/viroplasmin | 79 | MENIEKLLMQ EKILMLELDL VRAKISLARA NGSSQQGDLS LHRETPVKEE |
| IBMP_CAMVJ | protein | | AVHSALATFT PTQVKAIPEQ TAPGKESTNP LMASILPKDM NSVQTENRLV |
| | ORF VI | | KPLDFLRPHQ GIPIPQKSEP NSSVTLHRVE SGIQHPHTNY YVVYNGPHAG |
| | Cauliflower mosaic virus (strain | | IYDDWGCTKA ATNGVPGVAH KKFATITEAR AAADAYTTNQ QTGRLNFIPK |
| | S-Japan) (CaMV) | | GEAQLKPKSF AKALISPPKQ KAHWLTLGTK KPSSDPAPKE ISFDPEITMD |
| | | | DFLYLYDLAR KFDGEDDGTI FTTDNEKISL FNFRKNANPQ MVREAYTAGL |
| | | | IKTIYPSNNL QEIKYLPKKV KDAVKRFRTN CIKNTEKDIF LKIRSTIPVW |
| | | | TIQGLLHKPR QVIEIGVSKK IVPTESKAME SKIQIEDLTE LAVKSGEQFI |
| | | | QSLLRLNDKK KIFVNMVEHD TLVYSKNIKD TVSEDQRAIE TFQQRVISGN |
| | | | LLGFHCPAIC HFIMKTVEKE GGAYKCHHCE KGKAIVKDAS TDRGTTDKDG |
| | | | PPPTRSIVEK EDVPTTSSKQ VD |
| P03543 | Capsid protein | 80 | MAESILDRTI NRFWYNLGED CLSESQFDLM IRLMEESLDG DQIIDLTSLP |
| CAPSD_CAMVC | ORF IV | | SDNLQVEQVM TTTDDSISEE SEFLLAIGEI SEDESDSGEE PEFEQVRMDR |
| | Cauliflower mosaic virus (strain | | TGGTEIPKEE DGEGPSRYNE RKRKTPEDRY FPTQPKTIPG QKQTSMGMLN |
| | CM-1841) (CaMV) | | IDCQINRRTL IDDWAAEIGL IVKTNREDYL DPETILLLME HKTSGIAKEL |
| | | | IRNTRWNRTT GDIIEQVINA MYTMFLGLNY SDNKVAEKID EQEKAKIRMT |
| | | | KLQLFDICYL EEFTCDYEKN MYKTEMADFP GYINQYLSKI PIIGEKALTR |
| | | | FRHEANGTSI YSLGFAAKIV KEELSKICDL SKKQKKLKKF NKKCCSIGEA |
| | | | SVEYGGKKTS KKKYHKRYKK RYKVYKPYKK KKKFRSGKYF |
| | | | KPKEKKGSKR KYCPKGKKDC RCWICNIEGH YANECPNRQS SEKAHILQQA |
| | | | ENLGLQPVEE PYEGVQEVFI LEYKEEEEET STEESDDESS TSEDSDSD |
| P03544 | Capsid protein | 81 | MAESILDRTI NRFWYKLGDD CLSESQFDLM IRLMEESLDG DQIIDLTSLP |
| CAPSD_CAMVD | ORF IV | | SDNLQVEQVM TTTEDSISEE ESEFLLAIGE TSEEESDSGE EPEFEQVRMD |
| | Cauliflower mosaic virus (strain | | RTGGTEIPKE EDGGEPSRYN ERKRKTTEDR YFPTQPKTIP GQKQTTMGML |
| | D/H) (CaMV) | | NIDCQANRRT LIDDWAAEIG LIVKTNREDY |
| | | | LDPETILLLM EHKTSGIAKE LIRNTRWNRT TGDIIEQVID AMYTMFLGLN |
| | | | YSDNKVAEKI EEQEKAKIRM TKLQLCDICY LEEFTCDYEK NMYKTELADF |
| | | | PGYINQYLSK IPIIGEKALT RFRHEANGTS IYSLGFAAKI VKEELSKICD |
| | | | LTKKQKKLKK FNKKCCSIGE ASVEYGCKKT SKKKYHKRYK |
| | | | KKYKAYKPYK KKKKFRSGKY FKPKEKKGSK QKYCPKGKKD |
| | | | CRCWICNIEG HYANECPNRQ SSEKAHILQQ AEKLGLQPIE EPYEGVQEVF |
| | | | ILEYKEEEEE TSTEEDDGSS TSEDSDSESD |
| P03556 | Enzymatic polyprotein | 82 | MDHLLQKTQI QNQTEQVMNI TNPNSIYIKG RLYFKGYKKI ELHCFVDTGA |
| POL_CAMVD | ORF V | | SLCIASKFVI PEEHWINAER PIMVKIADGS SITINKVCRD IDLIIAGEIF |
| | Cauliflower mosaic virus (strain | | HIPTVYQQES GIDFIIGNNF CQLYEPFIQF TDRVIFTKDR TYPVHIAKLT |
| | D/H) (CaMV) | | RAVRVGTEGF LESMKKRSKT QQPEPVNIST NKIAILSEGR RLSEEKLFIT |
| | | | QQRMQKIEEL LEKVCSENPL DPNKTKQWMK ASIKLSDPSK AIKVKPMKYS |
| | | | PMDREEFDKQ IKELLDLKVI KPSKSPHMAP AFLVNNEAEK RRGKKRMVVN |
| | | | YKAMNKATVG DAYNPPNKDE LLTLIRGKKI FSSFDCKSGF WQVLLDQESR |
| | | | PLTAFTCPQG HYEWNVVPFG LKQAPSIFQR HMDEAFRVFR KFCCVYVDDI |
| | | | LVFSNNEEDH LLHVAMILQK CNQHGIILSK KKAQLFKKKI NFLGLEIDEG |
| | | | THKPQGHILE HINKFPDTLE DKKQLQRFLG ILTYASDYIP KLAQIRKPLQ |
| | | | AKLKENVPWK WTKEDTLYMQ KVKKNLQGFP PLHHPLPEEK LIIETDASDD |
| | | | YWGGMLKAIK INEGTNTELI CRYASGSFKA AEKNYHSNDK ETLAVINTIK |
| | | | KFSIYLTPVH FLIRTDNTHF KSFVNLNYKG DSKLGRNIRW QAWLSHYSFD |
| | | | VEHIKGTDNH FADFLSREFN RVNS |
| Q02964 | Enzymatic polyprotein | 83 | MDHLLLKTQT QTEQVMNVTN PNSIYIKGRL YFKGYKKIEL HCFVDTGASL |
| POL_CAMVE | ORF V | | CIASKFVIPE EHWVNAERPI MVKIADGSSI TISKVCKDID LIIAREIFKI |
| | Cauliflower mosaic virus (strain | | PTVYQQESGI DFIIGNNFCQ LYEPFIQFTD RVIFTKNKSY PVHIAKLTRA |
| | BBC) (CaMV) | | VRVGTEGFLE SMKKRSKTQQ PEPVNISTNK IENPLKEIAI LSEGRRLSEE |
| | | | KLFITQQRMQ KIEELLEKVC SENPLDPNKT KQWMKASIKL SDPSKAIKVK |
| | | | PMKYSPMDRE EFDKQIKELL DLKVIKPSKS PHMAPAFLVN NEAEKRRGKK |
| | | | RMVVNYKAMN KATIGDAYNL PNKDELLTLI RGKKIFSSFD CKSGFWQVLL |
| | | | DQESRPLTAF TCPQGHYEWN VVPFGLKQAP SIFQRHMDEA FRVFRKFCCV |
| | | | YVDDILVFSN NEEDHLLHVA MILQKCNQHG IILSKKKAQL FKKKINFLGL |
| | | | EIDEGTHKPQ GHILEHINKF PDTLEDKKQL QRFLGILTYA SDYIPKLAQI |
| | | | RKPLQAKLKE NVPWKWTKED TLYMQKVKKN LQGFPPLHHP LPEEKLIIET |
| | | | DASDDYWGGM LKAIKINEGT NTELICRYAS GSFKAAERNY HSNDKETLAV |
| | | | INTIKKFSIY LTPVHFLIRT DNTHFKSFVN LNYKGDSKLG RNIRWQAWLS |
| | | | HYSFDVEHIK GTDNHFADFL SREFNKVNS |
| Q02951 | Capsid protein | 84 | MAESILDRTI NRFWYNLGED CLSESQFDLM IRLMEESLDG DQIIDLTSLP |
| CAPSD_CAMVE | ORF IV | | SDNLQVEQVM TTTDDSISEE SEFLLAIGET SEDESDSGEE PEFEQVRMDR |
| | Cauliflower mosaic virus (strain | | TGGTEIPKKE DGAEPSRYNE RKRKTTEDRY FPTQPKTIPG QKQTSMGILN |
| | BBC) (CaMV) | | IDCQTNRRTL IDDWAAEIGL IVKTNREDYL DPETILLLME HKTSGIAKEL |
| | | | IRNTRWNRTT GDIIEQVIDA MYTMFLGLNY SDNKVAEKID EQEKAKIRMT |
| | | | KLQLCDICYL EEFTCDYEKN MYKTELADFP GYINQYLSKI PIIGEKALTR |
| | | | FRHEANGTSI YSLGFAAKIV KEELSKICAL SKKQKKLKKF NKKCCSIGEA |
| | | | SVEYGCKKTS KKKYHNKRYK KKYKVYKPYK KKKKFRSGKY |
| | | | FKPKEKKGSK QKYCPKGKKD CRCWISNIEG HYANECPNRQ SSEKAHILQQ |
| | | | AEKLGLQPIE EPYEGVQEVF ILEYKEEEEE TSTEESDGSS TSEDSDSD |
| Q00956 | Capsid protein | 85 | MAESILDRTI NRFWYNLGED CLSESQFDLM IRLMEESLSG DQIIDLTSLP |
| CAPSD_CAMVN | ORF IV | | SDNLQVEQVM TTTEDSISEE SEFLLAIGET SEDESDSGEE PEFEQVRMDR |
| | Cauliflower mosaic virus (strain | | TGGTEIPKEE DGEPSRYNER KRKTTEDRYF PTQPKTIPRQ KQTSMGMLNI |
| | NY8153) (CaMV) | | DCQTNRRTLI DDWAAEIGLI VKTNREDYLN PETILLLMEH KTSGIAKELI |
| | | | RNTRWNRTTG DIIEQVIDRM YTMFLGLNYS DNKVAEKIDE QEKAKIRMTK |
| | | | LQLCDICYLE EFTCDYEKNM YKTELADFPG YINQYLSKIP IIGEKALTRF |
| | | | RHEANGTSIY SLGFERKICK EELSKIRDLS KNEKKLKKFN KKCCSIEEAS |
| | | | AEYGCKKTST KKYHKKRYKK KYKAYKPYKK KKKFRSGKYF |
| | | | KPKEKKGSKQ KYCPKGKKDC RCWICNIEGH YANECPNRQS SEKAHILQQA |
| | | | EKVGLQPIEA PYEGVQEVFI LEYKEEEEET STEESDDESS TSEDSDSD |
| P03548 | Aphid transmission protein ORF | 86 | MSITGQPHVY KKDTIIRLKP LSLNSNNRSY VFSSSKGNIQ NIINHLNNLN |
| VAT_CAMVS | II | | EIVGRSLLGI WKINSYFGLS KDPSESKSKN PSVFNTAKTI FKSGGVDYSS |
| | Cauliflower mosaic virus (strain | | QLKEIKSLLE AQNTRIKSLE KAIQSLENKI EPEPLTKEEV KELKESINSI |
| | Strasbourg) (CaMV) | | KEGLKNIIG |
| P03553 | Virion-associated protein ORF | 87 | MANLNQIQKE VSEILSDQKS MKADIKAILE LLGSQNPIKE SLETVAAKIV |
| VAP_CAMVD | III | | NDLTKLINDC PCNKEILEAL GNQPKEQLIG QPKEKGKGLN LGKYSYPNYG |
| | Cauliflower mosaic virus (strain | | VGNEELGSSG NPKALTWPFK APAGWPNQY |
| | D/H) (CaMV) | | |
| Q02967 | Virion-associated protein ORF | 88 | MANLNQIQKE VSEILSDQKS MKSDIKAILE LLGSQNPTKE SLEAVAAKIV |
| VAP_CAMVE | III | | NDLTKLINDC PCNKEILEAL GNQPKEQLIE QPKEKGKGLN LGKYSYPNYG |
| | Cauliflower mosaic virus (strain | | VGNEELGSSG NPKALTWPFK APAGWPNQF |
| | BBC) (CaMV) | | |
| P03550 | Aphid transmission protein | 89 | MSITGQPHVY KKDTIIRLKP LSLNSNNRSY VFSSSKGNIQ NIINHLNNLN |
| VAT_CAMVD | ORF II | | KIVGRSLLGI WKINSYFGLS KDPSESKSKN PSVFNTAKTI FKSGGVDYSS |
| | Cauliflower mosaic virus (strain | | QPKEIKSLLE AQNTRIKSLE KAIQSLDEKI EPEPLTKEEV KELKESINSI |
| | D/H) (CaMV) | | KEGLKNIIG |
| Q02966 | Aphid transmission protein | 90 | MRITGQPHVY KKDTIIRLKP LSLNSNNRSY VFSSSKGNIQ NIINHLNNLN |
| VAT_CAMVE | ORF II | | EIVGRSLLGI WKINSYFGLS KDPSESKSKN PSVFNTAKTI FKSGGVDYSS |
| | Cauliflower mosaic virus (strain | | QLKEIKSLLE AQNTRIKNLE KAIQSLDNKI EPEPLTKKEV KELKESINSI |
| | BBC) (CaMV) | | KEGLKNIIG |
| Q01087 | Aphid transmission protein | 91 | MSITGQPHVY KKDTIIRLKP LSLNSNNRSY VLVPQKGNIQ NIINHLNNLN |
| VAT_CAMVW | ORF II | | EIVGRSLLGI WKINSYFGLS KDPSESKSKN PSVFNTAKTI FKSGGVDYS |
| | Cauliflower mosaic virus (strain | | |
| | W260) (CaMV) | | |
| P03555 | Enzymatic polyprotein | 92 | MDHLLLKTQT QIEQVMNVTN PNSIYIKGRL YFKGYKKIEL HCFVDTGASL |
| POL_CAMVC | ORF V | | CIASKFVIPE EHWVNAERPI MVKIADGSSI TISKVCKDID LIIAGEIFKI |
| | Cauliflower mosaic virus (strain | | PTVYQQESGI DFIIGNNFCQ LYEPFIQFTD RVIFTKNKSY PVHITKLTRA |
| | CM-1841) (CaMV) | | VRVGIEGFLE SMKKRSKTQQ PEPVNISTNK IENPLEEIAI LSEGRRLSEE |
| | | | KLFITQQRMQ KIEELLEKVC SENPLDPNKT KQWMKASIKL SDPSKAIKVK |
| | | | PMKYSPMDRE EFDKQIKELL DLKVIKPSKS PHMAPAFLVN NEAEKRRGKK |
| | | | RMVVNYKAMN KATIGDAYNL PNKDELLTLI RGKKIFSSFD CKSGFWQVLL |
| | | | DQESRPLTAF TCPQGHYEWN VVPFGLKQAP SIFQRHMDEA FRVFRKFCCV |
| | | | YVDDILVFSN NEEDHLLHVA MILQKCNQHG IILSKKKAQL FKKKINFLGL |
| | | | EIDEGTHKPQ GHILEHINKF PDTLEDKKQL QRFLGILTYA SDYIPKLAQI |
| | | | RKPLQAKLKE NVPWKWTKED TLYMQKVKKN LQGFPPLHHP LPEEKLIIET |
| | | | DASDDYWGGM LKAIKINEGT NTELICRYAS GSFKAAERNY HSNDKETLAV |
| | | | INTIKKFSIY LTPVHFLIRT DNTHFKSFVN LNYKGDSKLG RNIRWQAWLS |
| | | | HYSFDVEHIK GTDNHFADFL SREFNKVNS |
| Q00962 | Enzymatic polyprotein | 93 | MMNHLLLKTQ TQTEQVMNVT NPNSIYIKGR LYFKGYKKIE LHCFVDTGAS |
| POL_CAMVN | ORF V | | LCIASKFVIP EEHWVNAERP IMVKIADGSS ITISKVCKDI DLIIVGVIFK |
| | Cauliflower mosaic virus (strain | | IPTVYQQESG IDFIIGNNFC QLYEPFIQFT DRVIFTKNKS YPVHIAKLTR |
| | NY8153) (CaMV) | | AVRVGTEGFL ESMKKRSKTQ QPEPVNISTN KIENPLEEIA ILSEGRRLSE |
| | | | EKLFITQQRM QKTEELLEKV CSENPLDPNK TKQWMKASIK LSDPSKAIKV |
| | | | KPMKYSPMDR EEFDKQIKEL LDLKVIKPSK SPHMAPAFLV NNEAENGRGN |
| | | | KRMVVNYKAM NKATVGDAYN LPNKDELLTL IRGKKIFSSF |
| | | | DCKSGFWQVL LDQESRPLTA FTCPQGHYEW NVVPFGLKQA PSIFQRHMDE |
| | | | AFRVFRKFCC VYVDDIVVFS NNEEDHLLHV AMILQKCNQH GIILSKKKAQ |
| | | | LFKKKINFLG LEIDEGTHKP QGHILEHINK FPDTLEDKKQ LQRFLGILTY |
| | | | ASDYIPNLAQ MRQPLQAKLK ENVPWKWTKE DTLYMQKVKK |
| | | | NLQGFPPLHH PLPEEKLIIE TDASDDYWGG MLKAIKINEG TNTELICRYR |
| | | | SGSFKAAERN YHSNDKETLA VINTIKKFSI YLTPVHFLIR TDNTHFKSFV |
| | | | NLNYKGDSKL GRNIRWQAWL SHYSFDVEHI KGTDNHFADF LSREFNKVNS |
| P03547 | Movement protein | 94 | MDLYPEENTQ SEQSQNSENN MQIFKSETSD GFSSDLKISN DQLKNISKTQ |
| MVP_CAMVD | ORF I | | LTLEKEKIFK MPNVLSQVMK KAFSRKNEIL YCVSTKELSV DIHDATGKVY |
| | Cauliflower mosaic virus (strain | | LPLITKEEIN KRLSSLKPEV RRTMSMVHLG AVKILLKAQF RNGIDTPIKI |
| | D/H) (CaMV) | | ALIDDRINSR RDCLLGAAKG NLAYGKFMFT VYPKFGISLN TQRLNQTLSL |
| | | | IHDFENKNLM NKGDKVMTIT YIVGYALTNS HHSIDYQSNA TIELEDVFQE |
| | | | IGNIQQSEFC TIQNDECNWA IDIAQNKALL GAKTKTQIGN SLQIGNIASS |
| | | | SSTENELARV SQNIDLLKNK LKEICGE |
| Q02968 | Movement protein | 95 | MDLYPEENTQ SEQSQNSENN MQIFKSENSD GFSSDLMISN DQLKNISKTQ |
| MVP_CAMVE | ORF I | | LTLEKEKIFK MPNVLSQVMK RAFSRKNEIL YCVSTKELSV DIHDATGKVY |
| | Cauliflower mosaic virus (strain | | LPLITREEIN KRLSSLKPEV RKTMSMVHLG AVKILLKAQF RNGIDTPIKI |
| | BBC) (CaMV) | | ALIDDRINSR RDCLLGAAKG NLAYGKFMFT VYPKFGISLN TQRLNQTLSL |
| | | | IHDFENKNLM NKGDKVMTIT YMVGYALTNS HHSIDYQSNA TIELEDVFQE |
| | | | IGNVBESDFC TIQNDECNWA IDIAQNKALL GAKTKSQIGN NLQIGNSASS |
| | | | SNTENELARV SQNIDLLKNK LKEICGE |
| Q00966 | Movement protein | 96 | MDLYPEEKTQ SKQSHNSENN MQIFKSENSD GFSSDLMISN DQLKNISKTQ |
| MVP_CAMVN | ORF I | | LTLEKEKIFK MPNVLSQVMK KAFSRKNEIL YCVSTKELSV DIHDATGKVY |
| | Cauliflower mosaic virus (strain | | LPLITKEEIN KRLSSLKPEV RKTMSMVHLG AVKILLKAQF RNGIDTPIKI |
| | NY8153) (CaMV) | | ALIDDRINSR RDCLLGAAKG NLAYGKFMFT VYPKFGISLN TQRLNQTLSL |
| | | | IHDFENKNLM NKGDKVMTIT YIVGYALTNS HHSIDYQSNA TIELEDVFQE |
| | | | IGNVQQCDFC TIQNDECNWA IDIAQNKALL GAKTQSQIGN SLQIGNSASS |
| | | | SNTENELARV SQNIDLLKNK LKEICGE |
| Q01089 | Movement protein | 97 | MDLYPEENTQ SEQSHNSENN MQIFKSENSD GFSSDLMISN DQLKNISKTQ |
| MVP_CAMVW | ORF I | | LTLEKEKIFK MPNVLSQVMK KAFSRKNEIL YCVSTKELSV DIHDATGKVY |
| | Cauliflower mosaic virus (strain | | LPLITKEEIN KRLSSLKPEV RRTMSMVHLG AVKILLKAQF RNGIDTPIKI |
| | W260) (CaMV) | | ALIDDRINSR KDCLLGAAKG NLAYGKFMFT VYPKFGISLN TQRLNQTLSL |
| | | | IHDFENKNLM NKGDKVMTIT YIVGYALTNS HHSIDYQSNA TIELEDVFQE |
| | | | IGNVQQSEFC TIQNDECNWA IDIAQNKALL GAKTKSQIGN SLQIGNSASS |
| | | | SNTENELARV SQNIDLLKNK LKEICGE |
| P03552 | Virion-associated protein ORF | 98 | MANLNQIQKE VSEILSDQKS MKSDIKAILE LLGSQNPTKE SLEAVAAKIV |
| VAP_CAMVC | III | | NDLTKLINDC PCNKEILEAL GNQPKEQLIE QPKEKGKGLN LGKYTYPNYG |
| | Cauliflower mosaic virus (strain | | VGNEELGSSG NPKALTWPFK APAGWPNQF |
| | CM-1841) (CaMV) | | |
| Q00967 | Virion-associated protein ORF | 99 | MANLNQIQKE VSEILSDQKS MKSDIKAILE MLGSQNPIKE SLEAVAAKIV |
| VAP_CAMVN | III | | NDLTKLINDC PCNKEILEAL GNQPKEQLIE QPKEKGKGLN LGKYSYPNYG |
| | Cauliflower mosaic virus (strain | | VGNEELGSSG NPKALTWPFK APAGWPNQF |
| | NY8153) (CaMV) | | |
| P03549 | Aphid transmission protein | 100 | MSITGQPHVY KKDTIIRLKP LSLNSNNRSY VFSSSKGNIQ NIINHLNNLN |
| VAT_CAMVC | ORF II | | EIVGRSLLGI WKINSYFGLS KDPSESKSKN PSVFNTAKNI FKSRGVDYSS |
| | Cauliflower mosaic virus (strain | | QLKEVKSLLE AQNTRIKNLE NAIQSLDNKI EPEPLTKEEV KELKESINSI |
| | CM-1841) (CaMV) | | KEGLKNIIG |
| Q00965 | Aphid transmission protein | 101 | MSITGQPHVY KKDTIIRLKP LSLNSNNRSY VFSSSKGNIQ NIINHLNNLN |
| VAT_CAMVN | ORF II | | EIVGRSLLGI WKINSYFGLS KDPSESKSKN PSVFNTAKTI FKSGGVDYSS |
| | Cauliflower mosaic virus (strain | | QLKEIKSLLE AQNTRIKSLE NAIQSLDNKI EPEPLTKEEV KELKESINSI |
| | NY8153) (CaMV) | | KEGLKNIIG |
| P19818 | Aphid transmission protein | 102 | MSITGQPHVY KKDTIIRLKP LSLNSNNRSY VFSSSKGNIQ NIINHLNNLN |
| VAT_CAMVP | ORF II | | EIVGRSLLGI WRINSYFGLS KDPSESKSKN PSVFNTAKTI FKSGGVDYSS |
| | Cauliflower mosaic virus (strain | | QLKEIKSLLE AQNTRIKNLE NAIQSLDNKI QPEPLTKEEV KELKESINSI |
| | PV147) (CaMV) | | KEALKNIIG |

[0213] CaMV Peptides:

Movement Protein

| | Predicted | Predicted | Confid. of | SEQ |
|---|---|---|---|---|
| Amino | −logIC50 | IC50 Value | prediction | ID |
| acid groups | (M) | (nM) | (Max = 1) | NO. |
| HLADRB1*0101 | | | | |
| NIDLLKNKL | 9.177 | 0.67 | 0.33 | 103 |
| LIDDRINSR | 8.687 | 2.06 | 0.33 | 104 |
| KILLKAQFR | 8.654 | 2.22 | 0.33 | 105 |
| TENELARVS | 8.441 | 3.62 | 0.29 | 106 |
| ITKEEINKR | 8.44 | 3.63 | 0.29 | 107 |
| HLADRB*0401 | | | | |
| NELARVSQN | 7.206 | 62.23 | 0.33 | 108 |
| VHLGAVKIL | 7.165 | 68.39 | 0.38 | 109 |
| FKMPNVLSQ | 7.121 | 75.68 | 0.29 | 110 |
| YPKFGISLN | 7.097 | 79.98 | 0.38 | 111 |
| VSQNIDLLK | 7.067 | 85.7 | 0.38 | 112 |
| HLADRB*0701 | | | | |
| YALTNSHHS | 7.494 | 32.06 | 0.38 | 113 |
| YCVSTKELS | 7.459 | 34.75 | 0.33 | 114 |
| TENELARVS | 7.367 | 42.95 | 0.38 | 115 |
| MVHLGAVKI | 7.31 | 48.98 | 0.33 | 116 |
| EVRKTMSMV | 7.222 | 59.98 | 0.38 | 117 |
| | Predicted | Predicted | Confidence of | SEQ |
| Amino | −logIC50 | IC50 Value | prediction | ID |
| acid groups | (M) | (nM) | (Max = 1) | NO. |

DNA Binding Protein

| | | | | |
|---|---|---|---|---|
| HLADRB1*0101 | | | | |
| PFKAPAGWP | 8.78 | 1.66 | 0.38 | 118 |
| KIVNDLTKL | 8.484 | 3.28 | 0.33 | 119 |
| DIKAILELL | 8.439 | 3.64 | 0.38 | 120 |
| SLETVAAKI | 8.38 | 4.17 | 0.33 | 121 |
| DLTKLINDC | 8.326 | 4.72 | 0.33 | 122 |
| HLADRB*0401 | | | | |
| EILEALGTQ | 6.927 | 118.3 | 0.29 | 123 |
| FKAPAGWPN | 6.881 | 131.52 | 0.29 | 124 |
| GSQNPIKES | 6.819 | 151.71 | 0.29 | 125 |
| EALGTQPKE | 6.809 | 155.24 | 0.29 | 126 |
| GNPKALTWP | 6.793 | 161.06 | 0.25 | 127 |
| HLADRB*0701 | | | | |
| PKALTWPFK | 7.53 | 29.51 | 0.38 | 128 |
| KGLNLGKYS | 7.439 | 36.39 | 0.38 | 129 |
| PFKAPAGWP | 7.385 | 41.21 | 0.33 | 130 |
| YPNYGVGNE | 7.257 | 55.34 | 0.38 | 131 |
| EALGTQPKE | 7.216 | 60.81 | 0.38 | 132 |

Reverse Transcriptase

| | | | | |
|---|---|---|---|---|
| HLADRB1*0101 | | | | |
| YVDDILVFS | 9.234 | 0.58 | 0.38 | 133 |
| FVDTGASLC | 9.152 | 0.7 | 0.38 | 134 |
| IIETDASDD | 8.959 | 1.1 | 0.29 | 135 |
| FIQFTDRVI | 8.942 | 1.14 | 0.33 | 136 |
| DYIPKLAQI | 8.915 | 1.22 | 0.38 | 137 |
| HLADRB*0401 | | | | |
| VVPFGLKQA | 7.269 | 53.83 | 0.38 | 138 |
| VTNPNSIYI | 7.195 | 63.83 | 0.25 | 139 |
| PLQAKLKEN | 7.183 | 65.61 | 0.29 | 140 |
| HYEWNVVPF | 7.145 | 71.61 | 0.29 | 141 |
| NYKGDSKLG | 7.131 | 73.96 | 0.33 | 142 |
| HLADRB*0701 | | | | |
| YKAMNKATV | 7.754 | 17.62 | 0.38 | 143 |
| EQVMNVTNP | 7.607 | 24.72 | 0.38 | 144 |
| IAKLTRAVR | 7.591 | 25.64 | 0.38 | 145 |
| YPVHIAKLT | 7.529 | 29.58 | 0.33 | 146 |
| GKKRMVVNY | 7.529 | 29.58 | 0.38 | 147 |

Aphid Transmission Protein

| | | | | |
|---|---|---|---|---|
| HLADRB1*0101 | | | | |
| RLKPLSLNS | 9.227 | 0.59 | 0.33 | 148 |
| NIQNIINHL | 8.713 | 1.94 | 0.29 | 149 |
| YKKDTIIRL | 8.446 | 3.58 | 0.38 | 150 |
| IIRLKPLSL | 8.416 | 3.84 | 0.33 | 151 |
| NIINHLNNL | 8.397 | 4.01 | 0.33 | 152 |
| HLADRB*0401 | | | | |
| KSKNPSVFN | 7.381 | 41.59 | 0.33 | 153 |
| IRLKPLSLN | 7.33 | 46.77 | 0.33 | 154 |
| EKAIQSLEN | 6.992 | 101.86 | 0.29 | 155 |
| YVFSSSKGN | 6.961 | 109.4 | 0.38 | 156 |
| QNIINHLNN | 6.919 | 120.5 | 0.29 | 157 |
| HLADRB*0701 | | | | |
| EAQNTRIKS | 8.209 | 6.18 | 0.38 | 158 |
| LNSNNRSYV | 7.434 | 36.81 | 0.38 | 159 |
| YKKDTIIRL | 7.315 | 48.42 | 0.38 | 160 |
| PLSLNSNNR | 7.268 | 53.95 | 0.38 | 161 |
| PEPLTKEEV | 7.224 | 59.7 | 0.38 | 162 |

Capsid Protein

| | | | | |
|---|---|---|---|---|
| HLADRB1*0101 | | | | |
| IIDLTSLPS | 9.436 | 0.37 | 0.38 | 163 |
| ILDRTINRF | 9.134 | 0.73 | 0.38 | 164 |
| LIDDWAAEI | 8.91 | 1.23 | 0.33 | 165 |
| YSLGFAAKI | 8.757 | 1.75 | 0.33 | 166 |
| YINQYLSKI | 8.756 | 1.75 | 0.38 | 167 |
| HLADRB*0401 | | | | |
| MYTMFLGLN | 7.39 | 40.74 | 0.29 | 168 |
| KYKAYKPYK | 6.919 | 120.5 | 0.29 | 169 |
| AKIRMTKLQ | 6.902 | 125.31 | 0.25 | 170 |
| SSEKAHILQ | 6.887 | 129.72 | 0.25 | 171 |
| DGEGPSRYN | 6.887 | 129.72 | 0.33 | 172 |
| HLADRB*0701 | | | | |
| LIRNTRWNR | 7.834 | 14.66 | 0.38 | 173 |
| EANGTSIYS | 7.712 | 19.41 | 0.38 | 174 |
| KIRMTKLQL | 7.425 | 37.58 | 0.38 | 175 |
| EKALTRFRH | 7.302 | 49.89 | 0.38 | 176 |
| EQVIDAMYT | 7.283 | 52.12 | 0.33 | 177 |

Inculsion Body Matrix Protein

| | | | | |
|---|---|---|---|---|
| HLADRB1*0101 | | | | |
| FAKALTSPP | 9.395 | 0.4 | 0.38 | 178 |
| FIQSLLRLN | 8.97 | 1.07 | 0.38 | 178 |
| YLYDLVRKF | 8.936 | 1.16 | 0.38 | 180 |
| NIKDTVSED | 8.87 | 1.35 | 0.33 | 181 |
| NILPKDMNS | 8.758 | 1.75 | 0.29 | 182 |
| HLADRB*0401 | | | | |
| NPLMANILP | 7.344 | 45.29 | 0.25 | 183 |
| VRAKISLAR | 7.164 | 68.55 | 0.33 | 184 |
| PKQKAHWLM | 7.122 | 75.51 | 0.21 | 185 |
| VSKKVVPTE | 7.098 | 79.8 | 0.25 | 186 |
| HTNYYVVYN | 7.068 | 85.51 | 0.21 | 187 |
| HLADRB*0701 | | | | |
| YVVYNGPHA | 7.823 | 15.03 | 0.38 | 188 |
| KKVKDAVKR | 7.777 | 16.71 | 0.33 | 189 |
| KVVPTESKA | 7.745 | 17.99 | 0.38 | 190 |
| PGVAHKKFA | 7.599 | 25.18 | 0.38 | 191 |
| PEKEEAVHS | 7.52 | 30.2 | 0.38 | 192 |

[0214] PMMV Protein Sequences:

| Protein | | SEQ ID | |
|---|---|---|---|
| Name | Accession # | NO. | Sequence |
| Replication | NP_619740.1 | 193 | MAYTQQATNAALASTLRGNNPLVNDLANRRLYESAVEQCNAHDRRPKVNFLRSISEEQTLIATKAYPE |
| Associated | | | FQITFYNTQNAVHSLAGGLRSLELEYLMMQIPYGSTTYDIGGNFAAHMFKGRDYVHCCMPNMDLRDV |
| Protein | | | MRHNAQKDSIELYLSKLAQKKKVIPPYQKPCFDKYTDDPQSVVCSKPFQHCEGVSHCTDKVYAVALHS |
| | | | LYDIPADEFGAALLRRNVHVCYAAFHFSENLLLEDSYVSLDDIGAFFSREGDMLNFSFVAESTLNYTHS |
| | | | YSNVLKYVCKTYFPASSREVYMKEFLVTRVNTWFCKFSRLDTFVLYRGVYHRGVDKEQFYSAMEDA |
| | | | WHYKKTLAMMNSERILLEDSSSVNYWFPKMKDMVIVPLFDVSLQNEGKRLARKEVMVSKDFVYTVL |
| | | | NHIRTYQSKALTYANVLSFVESIRSRVIINGVTARSEWDVDKALLQSLSMTFFLQTKLAMLKDDLVVQK |
| | | | FQVHSKSLTEYVWDEITAAFHNCFPTIKERLINKKLITVSEKALEIKVPDLYVTFHDRLVKEYKSSVEMP |
| | | | VLDVKKSLEEAEVMYNALSEISILKDSDKFDVDVFSRMCNTLGVDPLVAAKVMVAVVSNESGLTLTFE |
| | | | RPTEANVALALQPTITSKEEGSLKIVSSDVGESSIKEVVRKSEISMLGLTGNTVSDEFQRSTEIESLQQFH |
| | | | MVSTETIIRKQMHAMVYTGPLKVQQCKNYLDSLVASLSAAVSNLKKIIKDTAAIDLETKEKFGVYDVC |
| | | | LKKWLVKPLSKGHAWGVVMDSDYKCFVALLTYDGENIVCGETWRRVAVSSESLVYSDMGKIRAIRSV |
| | | | LKDGEPHISSAKVTLVDGVPGCGKTKEILSRVNFDEDLVLVPGKQAAEMIRRRANSSGLIVATKENVRT |
| | | | VDSFLMNYGRGPCQYKRLFLDEGLMLHPGCVNFLVGMSLCSEAFVYGDTQQIPYINRVATFPYPKHLS |
| | | | QLEVDAVETRRTTLRCPADITFFLNQKYEGQVMCTSSVTRSVSHEVIQGAAVMNPVSKPLKGKVITFTQ |
| | | | SDKSLLLSRGYEDVHTVHEVQGETFEDVSLVRLTPTPVGIISKQSPHLLVSLSRHTRSIKYYTVVLDAVV |
| | | | SVLRDLECVSSYLLDMYKVDVSTQXQLQIESVYKGVNLFVAAPKTGDVSDMQYYYDKCLPGNSTILNE |
| | | | YDAVTMQIRENSLNVKDCVLDMSKSVPLPRESETTLKPVIRTAAEKPRKPGLLENLVAMIKRNFNSPEL |
| | | | VGVVDIEDTASLVVDKFFDAYLIKEKKKPKNIPLLSRASLERWIEKQEKSTIGQLADFDFIDLPAVDQYR |
| | | | HMIKQQPKQRLDLSIQTEYPALQTIVYHSKKINALFGPVFSELTRQLLETIDSSRFMFYTRKTPTQIEEFFS |
| | | | DLDSNVPMDILELDISKYDKSQNEFHCAVEYEIWKRLGLDDFLAEVWKHGHRKTTLKDYTAGIKTCLW |
| | | | YQRKSGDVTTFIGNTIIIAACLSSMLPMERLIKGAFCGDDSILYFPKGTDFPDIQQGANLLWNFEAKLFRK |
| | | | RYGYFCGRYIIHHDRGCIVYYDPLKLISKLGAKHIKNREHLEEFRTSLCDVAGSLNNCAYYTHLNDAVG |
| | | | EVIKTAPLGSFVYRALVKYLCDKRLFQTLFLE |
| Replication | NP_619741.1 | 194 | MAYTQQATNAALASTLRGNNPLVNDLANRRLYESAVEQCNAHDRRPKVNFLRSISEEQTLIATKAYPE |
| Associated | | | FQITFYNTQNAVHSLAGGLRSLELEYLMMQIPYGSTTYDIGGNFAAHMFKGRDYVHCCMPNMDLRDV |
| Protein | | | MRHNAQKDSIELYLSKLAQKKKVIPPYQKPCFDKYTDDPQSVVCSKPFQHCEGVSHCTDKVYAVALHS |
| | | | LYDIPADEFGAALLRRNVHVCYAAFHFSENLLLEDSYVSLDDIGAFFSREGDMLNFSFVAESTLNYTHS |
| | | | YSNVLKYVCKTYFPASSREVYMKEFLVTRVNTWFCKFSRLDTFVLYRGVYHRGVDKEQFYSAMEDA |
| | | | WHYKKTLAMMNSERILLEDSSSVNYWFPKMKDMVIVPLFDVSLQNEGKRLARKEVMVSKDFVYTVL |
| | | | NHIRTYQSKALTYANVLSFVESIRSRVIINGVTARSEWDVDKALLQSLSMTFFLQTKLAMLKDDLVVQK |
| | | | FQVHSKSLTEYVWDEITAAFHNCFPTIKERLINKKLITVSEKALEIKVPDLYVTFHDRLVKEYKSSVEMP |
| | | | VLDVKKSLEEAEVMYNALSEISILKDSDKFDVDVFSRMCNTLGVDPLVAAKVMVAVVSNESGLTLFE |
| | | | RPTEANVALALQPTITSKEEGSLKIVSSDVGESSIKEVVRKSEISMLGLTGNTVSDEFQRSTEIESLQQFH |
| | | | MVSTETIIRKQMHAMVYTGPLKVQQCKNYLDSLVASLSAAVSNLKKIIKDTAAIDLETKEKFGVYDVC |
| | | | LKKWLVKPLSKGHAWGVVMDSDYKCFVALLTYDGENIVCGETWRRVAVSSESLVYSDMGKIRAIRSV |
| | | | LKDGEPHISSAKVTLVDGVPGCGKTKEILSRVNFDEDLVLVPGKQAAEMIRRRANSSGLIVATKENVRT |
| | | | VDSFLMNYGRGPCQYKRLFLDEGLMLHPGCVNFLVGMSLCSEAFVYGDTQQIPYINRVATFPYPKHLS |
| | | | QLEVDAVETRRTTLRCPADITFFLNQKYEGQVMCTSSVTRSVSHEVIQGAAVMNPVSKPLKGKVITFTQ |
| | | | SDKSLLLSRGYEDVHTVHEVQGETFEDVSLVRLTPTPVGIISKQSPHLLVSLSRHTRSIKYYTVVLDAVV |
| | | | SVLRDLECVSSYLLDMYKVDVSTQ |
| Movement | NP_619742.1 | 195 | MALVVKDDVKISEFINLSAAEKFLPAVMTSVKTVRISKVDKVIAMENDSLSDVNLLKGVKLVKDGYVC |
| Protein | | | LAGLVVSGEWNLPDNCRGGVSVCLVDKRMQRDDEATLGSYRTSAAKKRFAFKLIPNYSITTADAERK |
| | | | VWQVLVNIRGVAMEKGFCPLSLEFVSVCIVHKSNIKLGLREKITSVSEGGPVELTEAVVDEFIESVPMAD |
| | | | RLRKFRNQSKKGSNKYVGKRNDNKGLNKEGKLFDKVRIGQNSESSDAESSSF |
| Coat | NP_619743.1 | 196 | MAYTVSSANQLVYLGSVWADPLELQNLCTSALGNQFQTQQARTTVQQQFSDVWKTIPTATVRFPATG |
| Protein | | | FKVFRYNAVLDSLVSALLGAFDTRNRIIEVENPQNPTTAETLDATRRVDDATVAIRASISNLMNELVRGT |
| | | | GMYNQALFESASGLTWATTP |

[0215] PPMV Peptides

| | | | | |
|---|---|---|---|---|
| Amino | Predicted | Predicted | Confidence of | SEQ |
| acid | −logIC50 | IC50 Value | prediction | ID |
| groups | (M) | (nM) | (Max = 1) | NO |

Relication-Associated Protein 1a

| | | | | |
|---|---|---|---|---|
| HLADRB1*0101 | | | | |
| YAVALHSLY | 9.319 | 0.48 | 0.38 | 197 |
| FLQTKLAML | 9.19 | 0.65 | 0.33 | 198 |
| IIKDTAAID | 9.163 | 0.69 | 0.38 | 199 |
| QATNAALAS | 9.16 | 0.69 | 0.33 | 200 |
| MIRRRANSS | 9.072 | 0.85 | 0.29 | 201 |
| HLADRB*0401 | | | | |
| VPLFDVSLQ | 7.427 | 37.41 | 0.38 | 202 |
| YTQQATNAA | 7.422 | 37.84 | 0.33 | 203 |
| KVMVAVVSN | 7.371 | 42.56 | 0.29 | 204 |
| DSLVASLSA | 7.327 | 47.1 | 0.33 | 205 |
| QTLIATKAY | 7.319 | 47.97 | 0.25 | 206 |
| HLADRB*0701 | | | | |
| LIVATKENV | 8.413 | 3.86 | 0.38 | 207 |
| GAALLRRNV | 8.186 | 6.52 | 0.38 | 208 |
| MPVLDVKKS | 8.071 | 8.49 | 0.29 | 209 |
| AKVMVAVVS | 7.973 | 10.64 | 0.38 | 210 |
| DAVETRRTT | 7.909 | 12.33 | 0.38 | 211 |

Relication-Associated Protein 2

| | | | | |
|---|---|---|---|---|
| HLADRB1*0101 | | | | |
| YAVALHSLY | 9.319 | 0.48 | 0.38 | 212 |
| FLQTKLAML | 9.19 | 0.65 | 0.33 | 213 |
| IIKDTAAID | 9.163 | 0.69 | 0.38 | 214 |
| QATNAALAS | 9.16 | 0.69 | 0.33 | 215 |
| MIRRRANSS | 9.072 | 0.85 | 0.29 | 216 |
| HLADRB*0401 | | | | |
| VPLFDVSLQ | 7.427 | 37.41 | 0.38 | 217 |
| YTQQATNAA | 7.422 | 37.84 | 0.33 | 218 |
| KVMVAVVSN | 7.371 | 42.56 | 0.29 | 219 |
| DSLVASLSA | 7.327 | 47.1 | 0.33 | 220 |
| QTLIATKAY | 7.319 | 47.97 | 0.25 | 221 |
| HLADRB*0701 | | | | |
| LIVATKENV | 8.413 | 3.86 | 0.38 | 222 |
| GAALLRRNV | 8.186 | 6.52 | 0.38 | 223 |
| MPVLDVKKS | 8.071 | 8.49 | 0.29 | 224 |
| AKVMVAVVS | 7.973 | 10.64 | 0.38 | 225 |
| DAVETRRTT | 7.909 | 12.33 | 0.38 | 226 |

Movement Protein

| | | | | |
|---|---|---|---|---|
| HLADRB1*0101 | | | | |
| YSITTADAE | 8.95 | 1.12 | 0.33 | 227 |
| YRTSAAKKR | 8.929 | 1.18 | 0.38 | 228 |
| KISEFINLS | 8.825 | 1.5 | 0.33 | 229 |
| FINLSAAEK | 8.643 | 2.28 | 0.33 | 230 |
| SYRTSAAKK | 8.555 | 2.79 | 0.33 | 231 |
| HLADRB*0401 | | | | |
| VCLAGLVVS | 7.372 | 42.46 | 0.33 | 232 |
| VHKSNIKLG | 7.274 | 53.21 | 0.38 | 234 |
| NLLKGVKLV | 7.204 | 62.52 | 0.29 | 235 |
| SGEWNLPDN | 7.161 | 69.02 | 0.29 | 236 |
| ERKVWQVLV | 7.137 | 72.95 | 0.33 | 237 |
| HLADRB*0701 | | | | |
| PAVMTSVKT | 8.309 | 4.91 | 0.38 | 238 |
| EKFLPAVMT | 7.662 | 21.78 | 0.38 | 239 |
| TSVKTVRIS | 7.597 | 25.29 | 0.38 | 240 |
| LPDNCRGGV | 7.567 | 27.1 | 0.38 | 241 |
| GPVELTEAV | 7.52 | 30.2 | 0.38 | 242 |

Relication-Associated Protein 1b

| | | | | |
|---|---|---|---|---|
| HLADRB1*0101 | | | | |
| YYDPLKLIS | 9.635 | 0.23 | 0.33 | 243 |
| FIDLPAVDQ | 9.306 | 0.49 | 0.33 | 244 |
| DIEDTASLV | 9.215 | 0.61 | 0.33 | 245 |
| FVYRALVKY | 9.079 | 0.83 | 0.38 | 246 |
| FFSDLDSNV | 9.029 | 0.94 | 0.33 | 247 |
| HLADRB*0401 | | | | |
| VVLDAVVSV | 7.659 | 21.93 | 0.38 | 248 |
| VYYDPLKLI | 7.366 | 43.05 | 0.38 | 249 |
| VRLTPTPVG | 7.341 | 45.6 | 0.38 | 250 |
| VIQGAAVMN | 7.313 | 48.64 | 0.33 | 251 |
| WYQRKSGDV | 7.285 | 51.88 | 252 | |
| HLADRB*0701 | | | | |
| TVVLDAVVS | 8.395 | 4.03 | 0.33 | 253 |
| KGVNLFVAA | 7.891 | 12.85 | 0.38 | 254 |
| QIRENSLNV | 7.529 | 29.58 | 0.38 | 255 |
| FIDLPAVDQ | 7.495 | 31.99 | 0.38 | 256 |
| FIGNTIIIA | 7.482 | 32.96 | 0.38 | 257 |

Coat Protein

| | | | | |
|---|---|---|---|---|
| HLADRB1*0101 | | | | |
| YTVSSANQL | 9.105 | 0.79 | 0.38 | 258 |
| FRYNAVLDS | 8.598 | 2.52 | 0.29 | 259 |
| RRVDDATVA | 8.557 | 2.77 | 0.33 | 260 |
| NAVLDSLVS | 8.536 | 2.91 | 0.38 | 261 |
| KTIPTATVR | 8.491 | 3.23 | 0.38 | 262 |
| HLADRB*0401 | | | | |
| VRFPATGFK | 7.334 | 46.34 | 0.33 | 263 |
| FRYNAVLDS | 7.148 | 71.12 | 0.38 | 264 |
| VYLGSVWAD | 7.13 | 74.13 | 0.33 | 265 |
| VAIRASISN | 7.087 | 81.85 | 0.29 | 266 |
| VQQQFSDVW | 7.051 | 88.92 | 0.29 | 267 |
| HLADRB*0701 | | | | |
| IPTATVRFP | 7.516 | 30.48 | 0.33 | 268 |
| TLDATRRVD | 7.392 | 40.55 | 0.38 | 269 |
| NAVLDSLVS | 7.358 | 43.85 | 0.33 | 270 |
| QLVYLGSVW | 7.295 | 50.7 | 0.38 | 271 |
| RFPATGFKV | 7.262 | 54.7 | 0.38 | 272 |

[0216] Oat Blue Dwarf Virus Protein Sequence:

| | | SEQ | |
|---|---|---|---|
| Protein | | ID | |
| Name | Accession # | NO. | Sequence |
| Capsid | ADD13603.1 | 273 | MSGIHASQVGPPPASDDRTDRQPSLPLAPRLVESSLAVPYVDVPFQWAVASYAGDSAKFLTDDL |
| Protein | | | SGSSHLSRLTIGYRHAELISAELEFAPLAAAFSKPISVTAVWTIASIAPATTTELQYYGGRLLTLGG |
| | | | PVLMGSVTRIPADLTRLNPVIKTAVGFTDCPRFTYSVYANSGSANTPLITVMVRGVIRLSGPSGN |
| | | | TVTATT |
| Replicase- | ADD13602.1 | 274 | MTTYAFHPLLPTPTSFATVTGGGLKDVIETLSSTIHRDTIAAPLMETLASPYRDSLRDFPWAVPAS |
| Associated | 2.1 | | ALPFLQECGITVAGHGFKAHPHPVHKTIETHLLHKVWPHYAQVPSSVLFMKPSKFAKLQRGNA |
| Polyprotein | | | NFSALHNYRLTAKDTPRYPNTSTSLPDTETAFMHDALMYYTPAQIVDLFLSCPKLEKLYASLVV |
| | | | PPESSFTSISLHPDLYRFRFDGDRLIYELEGNPAHNYTQPRSALDWLRTTTIRGPGVSLTVSRLDS |
| | | | WGPCHSLLIQRGIPPMHAEHDSISFRGPRAVAIPEPSSLHQDLRHRLVPEDVYNALFLYVRAVRT |
| | | | LRVTDPAGFVRTQCSKSEYAWVTSSAWDNLAHFALLTAPHRPRTSFYLFSSTFQRLEHWVRHH |
| | | | TFLLAGLTTAFALPPSAWLANLVARTSASHIQGLALARRWLITPPHLFRPPSPPSFALLLQRNSTG |
| | | | PILLRGSRLEFEAFPSLAPQLARRFPFLARLLPQKPINPWIVASLAVAVAIPAASLAVRWFFGPDTP |
| | | | QAMHDRYHTMFHPREWRLTLPRGPISCGRSSFSPLPHPPSPTPAPDSRAGPLQPPSALPSTHEPAP |
| | | | ADLESPAPQAHAPQTEPPSPVIEQEARPDPFPAPAPRPAPTPSASAPSPAPTPSAPEPPSPTASEQAA |
| | | | SLIPAPSSALVVEPSGVVSASSWGATNQPADQVDDSPLARDPSASGPVRFYRDLFPANYAGDSG |
| | | | TFDFRARASGRSPTPYPAMDCLLVATEQATRISREALWDCLTATCPDSFLDPKSIAQHGLSTDHF |
| | | | VILAHRFSLCANFHSAAHVIQLGMADATSTFMINHTAGSAGLPGHFSLRLGDQPRALNGGLAQD |
| | | | LAVAALRFNISGDLLPTRSVHTYRSWPKRAKNLVSNMKNGFDGVMASINPIRPSDAREKIVALD |
| | | | GLLDIAQPRSVRLIHIAGFPGCGKTHPITKLLHTAAFRDFKLAVPTTELRSEWKELMKLSPSQAW |
| | | | RFGTWESSLLKSARILVIDEIYKLPRGYLDLAIHSDSSIEFVIALGDPLQGEYHSTHPSSSNSRLIPE |
| | | | VSHLAPYLDYYCLWSYRVPQDVATFFQVQSHNPALGFARLSKQFPTTGRVLTNSQNSMLTMTQ |
| | | | CGYSAVTIASSQGSTYSGATHIHLDRNSSLLSPSNSLVALTRSRTGVFFSGDPALLNGGPNSNLMF |
| | | | SAFFQGKSRHIRDWFPTLFPTATLLLSPLRQRHNRLTGALAPVEPSHLLLPDLPSLLPLPASGPYS |
| | | | RAFPVRSRFAAAVKPFDRSDVLSWAPIAVGDGETNAPRIDTSFLPETRRPLHFDLPSFRPQAPPPP |
| | | | SDPAPSGTAFEPVYPGETFENLVAHFLPAHDPTDREIHWRGQLSNQFPHIDKEYHLAAQPMTLL |
| | | | APIHDSKHDPTLLAASIQKRLRFRPSASPYRITPRDELLGQLLYESLCRAYHRSPTSTHPFDEALFV |
| | | | ECIDLNEFAQLTSKTQAVIMGNARRSDPDWRWSAVRIFSKTQHKVNEGSIFGAWKACQTLALM |
| | | | HDAVVLLLGPVKKYQRVFDARDRPAHLYIHAGQTPSSMSLWCQTHLTPAVKLANDYTAFDQS |
| | | | QHGEAVVLERKKMERLSIPDHLISLHVYLKTHVETQFGPLTCMRLTGEPGTYDDNTDYNLAVIN |
| | | | LEYAAAHVPTMVSGDDSLLDFEPPRRPEWVAIEPLLALRFKKERGLYATFCGYYASRVGCVRSP |
| | | | IALFAKLAIAVDDSSISDKLAAYLMEFAVGHSLGDSLWSALPLSAVPFQSACFDFFCRRAPRDLK |
| | | | LALHLGEVPETIIQRLSHLSWLSHAVYSLLPSRLRLAILHSSRQHRSLPEDPAVSSLQGELLHTFH |
| | | | APMPSPPSLPLFGGLSPDNILTPHEFRTALYESSAYPTPPNSPTSMSGIHASQVGPPPASDDRTDRQ |
| | | | PSLPLAPRLVESSLAVPYVDVPFQWAVASYAGDSAKFLTDDLSGSSHLSRLTIGYRHAELISAEL |
| | | | EFAPLAAAFSKPISVTAVWTIASIAPATTTELQYYGGRLLTLGGPVLMGSVTRIPADLTRLNPVIK |
| | | | TAVGFTDCPRFTYSVYANSGSANTPLITVMVRGVIRLSGPSGNTVTATT |
| RNA | NP_734079.1 | 275 | LAPAQPSHLLLPDLPSLPPLPASGPYSRSFPVRSRFAAAVKPSDRSDVLSWAPIAVGDGETNAPRI |
| Dependent | | | DTSFLPETRRPLHFDLPSFRPQAPPPPSDPAPSGTAFEPVYPGETEENLVAHFLPAHDPTDREIHW |
| RNA | | | RRQLSNQFPHVDKEYHLAAQPMTLLAPIHDSKHDPTLLAASIQKRLRFRPSASPYRISPRDELLG |
| Polymerase | | | QLLYESLCRAYHRSPTTTHPFDEALFVECIDLNEFAQLTSKTQAVIMGNARRSDPDWRWSAVRI |
| | | | FSKTQHKVNEGSIFGAWKACQTLALMHDAVVLLLGPVKKYQRVFDARDRPAHLYIHAGQTPSS |
| | | | MSLWCQTHLTPAVKLANDYTAFDQSQHGEAVVLERKKMERLSIPDHLISLHVHLKTHVETQFG |
| | | | PLTCMRLTGEPGTYDDNTDYNLAVINLEYAAAHVPTMVSGDDSLLDFEPPRRPEWVAIEPLLAL |
| | | | RFKKERGLYATFCGYYASRVGCVRSPIALFAKLAIAVDDSSISDKLAAYLMEFAVGHSLGDSLW |
| | | | SALPLSAVPFQSACFDFFCRRAPRDLKLALHLGEVPETIIQRLSHLSWLSHAVYSLLPSRLRLAIL |
| | | | HSSRQHRSLPEDPAVSSLQGELLQTFHAPMPSLPSLPLFGG |
| Methyltransferase/ | NP_734078.1 | 276 | MTTYAFHPLLPTPTSFATITGGGLKDVIETLSSTIHRDTIAAPLMETLASPYRDSLRDFPWAVPAS |
| Protease/ | | | ALPFLQECGITVAGHGFKAHPHPVHKTIETHLLHKVWPHYAQVPSSVLFMKPSKFAKLQRGNA |
| Helicase | | | NFSALHNYRLTAKDTPRYPNTSTSLPDTETAFMHDALMYYTPAQIVDLFLSCPKLEKLYASLVV |
| | | | PPESSFTSISLHPDLYRFRFDGDRLIYELEGNPAHNYTQPRSALDWLRTTTIRGPGVSLTVSRLDS |
| | | | WGPCHSLLIQRGIPPMHAEHDSISFRGPRAVAIPEPSSLHQDLRHRLVPEDVYNALFLYVRAVRT |
| | | | LRVTDPAGFVRTQCSKPEYAWVTSSAWDNLAHFALLTAPHRPRTSFYLFSSTFQRLEHWVRHH |
| | | | TFLLAGLTTAFALPPSAWLANLVARASASHIQGLALARRWLITPPHLFRPPPPPSFALLLQRNSTG |
| | | | PVLLRGSRLEFEAFPSLAPQLARRFPFLARLLPQKPIDPWVVASLAVAVAIPAASLAVRWFFGPD |
| | | | TPQAMHDRYHTMFHPREWRLTLPRGPISCGRSSFSPLPHPPSPTPAPDSRAEPLQPPSAPPSTHEP |
| | | | APADLEPQAPPAHAPQTEPPSPVIEQEARPNPLPAPAPLSAPTPSASAPSLAPTPSAPEPPSPTASEQ |
| | | | AASLIPAPSSALVVEPSGVVSASSWGATNQPADQVDDSPLARDPSASGPVRFYRDLFPANYAGD |
| | | | SGTFDFRARASGRSPTPYPAMDCLLVATEQATRISREALWDCLTATCPDSFLDPKSIAQHGLSTD |
| | | | HFVILAHRFSLCANFHSAEHVIQLGMADATSIFMINHTAGSAGLPGHFSLRLGDQPRALNGGLA |
| | | | QDLAVAALRFNISGDLLPTRSVHTYRSWPKRAKNLVSNMKNGFDGVMASINPIRPSDAREKIVA |
| | | | LDGLLDIARPRSVRLIHIAGFPGCGKTHPITKLLHTAAFRDFKLAVPTTELRSEWKELMKLSPSQA |
| | | | WRFGTWESSLLKSARILVIDEIYKLPRGYLDLAIHSDSSIEFVIALGDPLQGEYHSTHPSSSNSRLIP |
| | | | EVSHLAPYLDYYCLWSYRVPQDVAAFFQVQSHNPALGFARLSKQFPTTGRVLTNSQNSMLTMT |
| | | | QCGYSAVTIASSQGSTYSGATHIHLDRNSSLLSPSNSLVALTRSRTGVFFSGDPALLNGGPNSNL |
| | | | MFSAFFQGKSRHIRAWFPTLFPTATLLFSPLRQRHNRLTGA |

[0217] Oat Blue Dwarf Virus (OBDV) Peptides

| | | | | |
|---|---|---|---|---|
| Amino | Predicted | Predicted | Confidence of | SEQ |
| acid | −logIC50 | IC50 Value | prediction | ID |
| groups | (M) | (nM) | (Max = 1) | NO |

Capsid Protein

| | | | | |
|---|---|---|---|---|
| HLADRB1*0101 | | | | |
| FLTDDLSGS | 9.31 | 0.49 | 0.38 | 277 |
| PADLTRLNP | 9.024 | 0.95 | 0.38 | 278 |
| FAPLAAAFS | 9.016 | 0.96 | 0.38 | 279 |
| PATTTELQY | 9.01 | 0.98 | 0.38 | 280 |
| FQWAVASYA | 8.813 | 1.54 | 0.33 | 281 |
| HLADRB*0401 | | | | |
| PVLMGSVTR | 7.442 | 36.14 | 0.29 | 282 |
| SGSANTPLI | 7.332 | 46.56 | 0.33 | 283 |
| SVYANSGSA | 7.289 | 51.4 | 0.33 | 284 |
| VWTIASIAP | 7.207 | 62.09 | 0.29 | 285 |
| VIKTAVGFT | 7.196 | 63.68 | 0.38 | 286 |
| HLADRB*0701 | | | | |
| PISVTAVWT | 7.94 | 11.48 | 0.33 | 287 |
| PADLTRLNP | 7.853 | 14.03 | 0.38 | 288 |
| PVIKTAVGF | 7.717 | 19.19 | 0.38 | 289 |
| FQWAVASYA | 7.603 | 24.95 | 0.38 | 290 |
| GPVLMGSVT | 7.57 | 26.92 | 0.38 | 291 |

Replicase Associated Poly Protein a

| | | | | |
|---|---|---|---|---|
| HLADRB1*0101 | | | | |
| YYTPAQIVD | 9.144 | 0.72 | 0.38 | 292 |
| FRDFKLAVP | 9.106 | 0.78 | 0.38 | 293 |
| HIQGLALAR | 9.103 | 0.79 | 0.38 | 294 |
| FALLLQRNS | 9.096 | 0.8 | 0.33 | 295 |
| HRDTIAAPL | 9.051 | 0.89 | 0.38 | 296 |
| HLADRB*0401 | | | | |
| SEQAASLIP | 7.422 | 37.84 | 0.33 | 297 |
| AWLANLVAR | 7.352 | 44.46 | 0.33 | 298 |
| AIPAASLAV | 7.332 | 46.56 | 0.33 | 299 |
| FEAFPSLAP | 7.322 | 47.64 | 0.38 | 300 |
| PRPAPTPSA | 7.315 | 48.42 | 0.33 | 301 |
| HLADRB*0701 | | | | |
| LAVAVAIPA | 8.051 | 8.89 | 0.38 | 302 |
| KPINPWIVA | 8.023 | 9.48 | 0.38 | 303 |
| FALLTAPHR | 7.918 | 12.08 | 0.38 | 304 |
| FAKLQRGNA | 7.887 | 12.97 | 0.38 | 305 |
| LANLVARTS | 7.843 | 14.35 | 0.38 | 306 |

methyltransferase/protease/helicase a

| | | | | |
|---|---|---|---|---|
| HLADRB1*0101 | | | | |
| YYTPAQIVD | 9.144 | 0.72 | 0.38 | 307 |
| FRDFKLAVP | 9.106 | 0.78 | 0.38 | 308 |
| HIQGLALAR | 9.103 | 0.79 | 0.38 | 309 |
| FALLLQRNS | 9.096 | 0.8 | 0.33 | 310 |
| NLVARASAS | 9.076 | 0.84 | 0.33 | 311 |
| HLADRB*0401 | | | | |
| PSLAPTPSA | 7.473 | 33.65 | 0.33 | 312 |
| SEQAASLIP | 7.422 | 37.84 | 0.33 | 313 |
| AWLANLVAR | 7.352 | 44.46 | 0.33 | 314 |
| VRTQCSKPE | 7.341 | 45.6 | 0.25 | 315 |
| AIPAASLAV | 7.332 | 46.56 | 0.33 | 316 |
| HLADRB*0701 | | | | |
| LAVAVAIPA | 8.051 | 8.89 | 0.38 | 317 |
| FALLTAPHR | 7.918 | 12.08 | 0.38 | 318 |
| FAKLQRGNA | 7.887 | 12.97 | 0.38 | 319 |
| KPIDPWVVA | 7.844 | 14.32 | 0.38 | 320 |
| LAQDLAVAA | 7.839 | 14.49 | 0.38 | 321 |

RNA Dependant RNA Pol

| | | | | |
|---|---|---|---|---|
| HLADRB1*0101 | | | | |
| RFRPSASPY | 9.008 | 0.98 | 0.29 | 322 |
| SISDKLAAY | 8.954 | 1.11 | 0.38 | 323 |
| EYHLAAQPM | 8.923 | 1.19 | 0.33 | 324 |
| PAVKLANDY | 8.923 | 1.19 | 0.33 | 325 |
| YIHAGQTPS | 8.854 | 1.4 | 0.38 | 326 |
| HLADRB*0401 | | | | |
| YHLAAQPMT | 7.516 | 30.48 | 0.38 | 327 |
| FRPSASPYR | 7.392 | 40.55 | 0.38 | 328 |
| PSLPPLPAS | 7.346 | 45.08 | 0.29 | 329 |
| DKLAAYLME | 7.339 | 45.81 | 0.25 | 330 |
| FRPQAPPPP | 7.313 | 48.64 | 0.38 | 331 |
| HLADRB*0701 | | | | |
| YPGETFENL | 7.766 | 17.14 | 0.38 | 332 |
| RWSAVRIFS | 7.699 | 20 | 0.38 | 333 |
| PAVKLANDY | 7.679 | 20.94 | 0.38 | 334 |
| YAAAHVPTM | 7.672 | 21.28 | 0.33 | 335 |
| FPVRSRFAA | 7.659 | 21.93 | 0.38 | 336 |

Replicase Associated Poly Protein b

| | | | | |
|---|---|---|---|---|
| HLADRB1*0101 | | | | |
| FPTATLLLS | 9.474 | 0.34 | 0.38 | 337 |
| FLTDDLSGS | 9.31 | 0.49 | 0.38 | 338 |
| TATLLLSPL | 9.04 | 0.91 | 0.33 | 339 |
| FAPLAAAFS | 9.016 | 0.96 | 0.38 | 340 |
| PATTTELQY | 9.01 | 0.98 | 0.38 | 341 |
| HLADRB*0401 | | | | |
| YHLAAQPMT | 7.516 | 30.48 | 0.38 | 342 |
| FRPSASPYR | 7.392 | 40.55 | 0.38 | 343 |
| VYLKTHVET | 7.348 | 44.87 | 0.29 | 345 |
| DKLAAYLME | 7.339 | 45.81 | 0.25 | 346 |
| FRPQAPPPP | 7.313 | 48.64 | 0.38 | 347 |
| HLADRB*0701 | | | | |
| PISVTAVWT | 7.94 | 11.48 | 0.33 | 348 |
| EVSHLAPYL | 7.791 | 16.18 | 0.33 | 349 |
| YPGETFENL | 7.766 | 17.14 | 0.38 | 350 |
| RWSAVRIFS | 7.699 | 20 | 0.38 | 351 |
| PAVKLANDY | 7.679 | 20.94 | 0.38 | 352 |

methyltransferase/protease/helicase b

| | | | | |
|---|---|---|---|---|
| HLADRB1*0101 | | | | |
| FPTATLLFS | 9.283 | 0.52 | 0.38 | 353 |
| GYLDLAIHS | 8.806 | 1.56 | 0.29 | 354 |
| HIHLDRNSS | 8.758 | 1.75 | 0.38 | 355 |
| RNSSLLSPS | 8.755 | 1.76 | 0.33 | 356 |
| TATLLFSPL | 8.732 | 1.85 | 0.33 | 357 |
| HLADRB*0401 | | | | |
| RVLTNSQNS | 7.182 | 65.77 | 0.29 | 358 |
| SHLAPYLDY | 7.172 | 67.3 | 0.25 | 359 |
| TNSQNSMLT | 7.125 | 74.99 | 0.29 | 360 |
| FPTATLLFS | 7.108 | 77.98 | 0.33 | 361 |
| SRLIPEVSH | 7.107 | 78.16 | 0.33 | 362 |
| HLADRB*0701 | | | | |
| EVSHLAPYL | 7.791 | 16.18 | 0.33 | 363 |
| GYLDLAIHS | 7.602 | 25 | 0.38 | 364 |
| YSGATHIHL | 7.507 | 31.12 | 0.38 | 365 |
| YRVPQDVAA | 7.411 | 38.82 | 0.38 | 366 |
| TRSRTGVFF | 7.332 | 46.56 | 0.38 | 367 |

[0218] Rice Grassy Stunt Virus Protein Sequence:

| | | SEQ | |
|---|---|---|---|
| Protein | | ID | |
| Name | Accession # | NO. | Sequence |
| RNA | NP_058528.1 | 368 | MNTNCQFSNISYLHNMNNEIVGVERFKYNDVEYDINGSLVDCFYKGAETIPTPSPNLKCFFNALC |
| Polymerase | | | LCLRVESKDYIKVMNKLRNQYYAMSIWTASELKELLRELDPNDSYMATYYSIIHVSICLDICICIH |
| | | | DETWDSHCKTFGDRSKLMIHMKLESRHYEAIDDPTYDYFELSSVLGGYLGSLDDDIDLPSMIELK |
| | | | VETKPLGDVFTERGQWYNSLASLAESNLHQQVPQFNCNLFSSIVRLKKYSRQQEVAMLSLNLGM |
| | | | TIEVRLLSYHENLYSLEGGFKCVGPGNGLLELIYDGSTNKWFFLKISGLLEVDQNYQVLEKVHDL |
| | | | ESLIRQLTQSFVQPSNWYSNKLKMIEKCKTIFPQRREVDYEPFLNKNKLLSLCFLSKELENLLTILL |
| | | | VDNDMVNVGTILKPKIYKYWGQNPELTKKQKHELLDSEGNLWGAVKSGLPVTVLRDDQYDKDF |
| | | | PTLSFSRKTAEFLFTSYDDDIQKLTNPEHSGYDESMYGLYEMHPRLKVPETSEIVSPDETEIVISFEN |
| | | | RFGNRKYHDFPSIPDNRAYSCKISTVKNIVHDFTFALFGDDLDVSFTDAGLFIPGDPDNNKTPDMII |
| | | | KHGEKHYSVIEFTTRNTNMRPDVRSRGWEDKTLKYRDAIHNRRDHFKISIDYYIIVVCQNGVQTN |
| | | | LMNLPTETMDELIYRYKLARQIALQIEQNLEYDIKADQAMKMEISSIKKIIEGIRIHKEDGELDPSK |
| | | | FIKPYTMAHYTKAVGTLESEDYDYLHKLDTYVSNKSMRKMEKLKHLNDVNIRAYRDEIRNESIL |
| | | | MMQSRKMEYESNFIKNEEAYRTSNEASVQLPMLVPKIVRVVGVSNTHEEVRNVVDEIISTSSMSS |
| | | | TEEAWKQGICGFMHYLYEIEDGKSDFSLAMEEPTLSTQMEDDLKKIRNKFNRISMVFDMDDRIDL |
| | | | AKIGINGKKYSKDPEVLAYRNESKKPFSLFTSTDDIERFINEECLQLFTPHDQELDNSVLDLISDSLK |
| | | | IHGCSSQSRLLESLDTYLKSKAYLFTKFVSDLAVELSISVKQNCQPREFIVKRLRDFQVYVLIKSTG |
| | | | SDGKVFFSLLFREDQELSKIINTTFKKVSKLGDRFLYTDFISVNYSKLVNWTRCESLMLSLYAFWR |
| | | | EQYNIPPNIGISSIPDEDFNSDYLKMWANCLLVLLNDKHQTEEVITSTRFIHMEAFVETPNWPKPH |
| | | | KMFEKLSTIPRSRLEVFYIKSAIKLMECYTETPIRLDNSGPMRRWYNIKNPFVTENGSLSNFPNHDV |
| | | | MLSSMYLGYLKNKDEDPEDNASGQLISKILGYEDKLPRGEDKKYLGLEDPPVDQCSTHMYSISLV |
| | | | KRMCDSFLGRLKSETGVSDPKDYLSTLCLEYLSHEFLESFVTLKASSNFSAEYYEYRPNENKRSRP |
| | | | QTVNEDLPKSESNRRNYGRSKVIEKIQTILTKKDPNEKYRLVVDLLKESLEEVEKNACLHVCIFRK |
| | | | NQHGGLREIYVLNIYERIVQKCVEDLARAILSVVPSETMTHPKNKFQIPNKHNIAARKEFGDSYFT |
| | | | VCTSDDASKWNQGHHVSKFITILVRILPKFWHGFIVRALQLWFHKRLFLGDDLLRLFCANDVLNT |
| | | | TDEKVKKVHEVFKGREVAPWMTRGMTYIETESGFMQGILHYISSLFHAIFLEDLAERQKKQLPQ |
| | | | MARIIQPDNESNVIIDCMESSDDSSMMISFSTKSMNDRQTFAMLLLVDRAFSLKEYYGDMLGIYK |
| | | | SIKSTTGTIFMMEFNIEFFFAGDTHRPTIRWVNAALNVSEQETLIASQEEMSNTLKDILEGGGTFYH |
| | | | TFVTQVAQAMLHYRMYGSSVSPLWGSYCSMIKLSKDPALGYFLMDHPMASGLMGFGYNLWKT |
| | | | CKQSFLSVKYADMLNLEFNTENSKRKMTPDIANLGVLSRTTTVGFGNKTKWMKMCDRMHLTD |
| | | | DIFDSIEQNPRILFFHAKNAEEMQQKIAIKMRSPGVMQSLAKTNTLGRRVASSVYFISRNVLFSMS |
| | | | AGVETDEKRKTSIFRELLNSNSNVVSKIGQKEAQIPGVQSLTEEPSDDFYSVEGLREGVIKMVSVL |
| | | | TDLTMEQSERLLSEKFGLTLDDTKLNDWFIDENKLMHKLSKGFGINIHVYISRDPEASFKLCHTFK |
| | | | CLTNSENLYFMLNPNYLLVRRQESSSMSDEHRRQIQYSVAKFIWFGEKDVPAHPKTLKIVWKKY |
| | | | KETWLWLRDTIGDTLVGSPFVSYIQLNNYLSRVSTKGRVLHFVGTMGKASSGNVNLMTLIRNNF |
| | | | SNGIVFSGGFTDVIKKEKTEDYKSLLSNLTMLNQSPLKYEEKLVAMTDLIVDNKDLEYSTSMLGS |
| | | | KRNKLAIIQMFLRTDPDLKFSGDYNTQDAVNLVEHHLGEFDQNLSLGGFRSLIRMGQLVEKELLD |
| | | | SGMGYEELEKNFEDLTINSLSASARRAYCQYIYCDRVLEDAYQQYNKRKPTQKMLLSLELLKAE |
| | | | AANDPTRNWLTMIGHRIVKSSYDLMKLRDEAKYCRRDIMEKIRIGNLGLLGGYVQKQSYNREEK |
| | | | KYFGPGVWRGYLHDVAVQIEVNSDQNMESYIKSVSLSSAMHLSDTIQSLKEWSREHRVGNSHYT |
| | | | MAYGNRDCEMLGRMFEERRVQMSDRDGCPIVLDPKLIIHQPFLSDSECIDITDHSIRLLQECTGER |
| | | | APYTTVLTVHLSKKDVITSELQSQQNVNMIKRLKMDDWLKDWILWRDQRAPTSLFTQMNLGQF |
| | | | PDLVDEKRLKSWCRELFESSLGYQKIVQLSKLSKAARDRLAHDYPESIQEDKEVCEELESMESLLT |
| | | | RISQAYKTIDMTIKDEDLEHLYELARDLAEEQDEIQMEKEAVNVSLFHKMFLSSVRKMDTFMGT |
| | | | DDLRLTMNIIKGESRQKLPASSMHYKRILQFMYDVPDSQFPTYNPPSSRGRGRRGRGRSYMF |
| 18.9K | NP_058527.1 | 369 | MGYYHSKTDNPKLITTKIRKYKVFSIPVKTQVIIITGSTLSLDFFTLQTWIHLQEGFILEMGVRSTNG |
| Protein | 27.1 | | VLKIVNTICQENGKIERDRWDWYGCADSGLRKVHYDEGIARSERTSIRVDIRGTLFVLTVDGHILG |
| | | | VYDVNSCINAINIGLEVLPNSDNTLDFDLIYH |

[0219] Rice Grassy Stunt Virus Peptides

| | | | | |
|---|---|---|---|---|
| Amino | Predicted | Predicted | Confidence of | SEQ |
| acid groups | −logIC50 (M) | IC50 Value (nM) | prediction (Max = 1) | ID NO |

RNA Polymerase a

| | | | | |
|---|---|---|---|---|
| HLADRB1*0101 | | | | |
| WYNSLASLA | 9.225 | 0.6 | 0.38 | 370 |
| YRDAIHNRR | 9.181 | 0.66 | 0.38 | 371 |
| YRDEIRNES | 9.075 | 0.84 | 0.29 | 372 |
| ILKPKIYKY | 9.027 | 0.94 | 0.38 | 373 |
| EYDIKADQA | 8.905 | 1.24 | 0.29 | 374 |
| HLADRB*0401 | | | | |
| TNLMNLPTE | 7.454 | 35.16 | 0.25 | 375 |
| QELDNSVLD | 7.452 | 35.32 | 0.33 | 376 |
| VPQFNCNLF | 7.287 | 51.64 | 0.33 | 377 |
| ASLAESNLH | 7.266 | 54.2 | 0.33 | 378 |
| VGPGNGLLE | 7.258 | 55.21 | 0.33 | 379 |
| HLADRB*0701 | | | | |
| KIVRVVGVS | 8.09 | 8.13 | 0.38 | 380 |
| YQVLEKVHD | 7.923 | 11.94 | 0.38 | 381 |
| EEVRNVVDE | 7.674 | 21.18 | 0.38 | 382 |
| PKIVRVVGV | 7.623 | 23.82 | 0.33 | 383 |
| LKHLNDVNI | 7.553 | 27.99 | 0.38 | 384 |

RNA Polymerase c

| | | | | |
|---|---|---|---|---|
| HLADRB1*0101 | | | | |
| DYKSLLSNL | 9.247 | 0.57 | 0.38 | 385 |
| FEDLTINSL | 9.199 | 0.63 | 0.38 | 386 |
| YNTQDAVNL | 9.129 | 0.74 | 0.38 | 387 |
| KYKETWLWL | 9.125 | 0.75 | 0.33 | 388 |
| YIKSVSLSS | 8.873 | 1.34 | 0.38 | 389 |
| HLADRB*0401 | | | | |
| VIKMVSVLT | 7.488 | 32.51 | 0.38 | 390 |
| VNLMTLIRN | 7.398 | 39.99 | 0.33 | 391 |
| QKLPASSMH | 7.377 | 41.98 | 0.29 | 392 |
| QSQQNVNMI | 7.264 | 54.45 | 0.33 | 393 |
| TMLNQSPLK | 7.24 | 57.54 | 0.29 | 394 |
| HLADRB*0701 | | | | |
| HPKTLKIVW | 7.875 | 13.34 | 0.38 | 395 |
| HFVGTMGKA | 7.665 | 21.63 | 0.38 | 396 |
| TTVLTVHLS | 7.6 | 25.12 | 0.38 | 397 |
| KIVQLSKLS | 7.574 | 26.67 | 0.38 | 398 |
| VAVQIEVNS | 7.536 | 29.11 | 0.38 | 399 |

RNA Polymerase b

| | | | | |
|---|---|---|---|---|
| HLADRB1*0101 | | | | |
| YLKMWANCL | 9.609 | 0.25 | 0.33 | 400 |
| YLKSKAYLF | 9.361 | 0.44 | 0.38 | 401 |
| FVSDLAVEL | 9.357 | 0.44 | 0.33 | 402 |
| YLSTLCLEY | 9.278 | 0.53 | 0.29 | 403 |
| FVTLKASSN | 9.227 | 0.59 | 0.38 | 404 |
| HLADRB*0401 | | | | |
| DHPMASGLM | 7.42 | 38.02 | 0.29 | 405 |
| VELSISVKQ | 7.371 | 42.56 | 0.38 | 406 |
| VTLKASSNF | 7.363 | 43.35 | 0.25 | 407 |
| WVNAALNVS | 7.353 | 44.36 | 0.38 | 408 |
| DYLSTLCLE | 7.345 | 45.19 | 0.25 | 409 |
| HLADRB*0701 | | | | |
| LAVELSISV | 7.687 | 20.56 | 0.38 | 410 |
| KQSFLSVKY | 7.637 | 23.07 | 0.38 | 411 |
| FVSDLAVEL | 7.595 | 25.41 | 0.38 | 412 |
| PRSRLEVFY | 7.584 | 26.06 | 0.38 | 413 |
| FISRNVLFS | 7.578 | 26.42 | 0.38 | 414 |

Other Viral Protein

| | | | | |
|---|---|---|---|---|
| HLADRB1*0101 | | | | |
| LITTKIRKY | 9.01 | 0.98 | 0.38 | 415 |
| YYHSKTDNP | 8.943 | 1.14 | 0.33 | 416 |
| HYDEGIARS | 8.588 | 2.58 | 0.33 | 417 |
| KIVNTICQE | 8.47 | 3.39 | 0.33 | 418 |
| KYKVFSIPV | 8.384 | 4.13 | 0.38 | 419 |
| HLADRB*0401 | | | | |
| EVLPNSDNT | 7.398 | 39.99 | 0.25 | 420 |
| VRSTNGVLK | 7.173 | 67.14 | 0.38 | 421 |
| YGCADSGLR | 7.139 | 72.61 | 0.33 | 422 |
| VYDVNSCIN | 7.081 | 82.99 | 0.33 | 423 |
| GVLKIVNTI | 6.951 | 111.94 | 0.25 | 424 |
| HLADRB*0701 | | | | |
| YDVNSCINA | 7.643 | 22.75 | 0.33 | 425 |
| KIVNTICQE | 7.595 | 25.41 | 0.38 | 426 |
| LFVLTVDGH | 7.581 | 26.24 | 0.38 | 427 |
| IPVKTQVII | 7.532 | 29.38 | 0.38 | 428 |
| PVKTQVIII | 7.323 | 47.53 | 0.38 | 429 |

NP_058538.1, NP_058536.1, NP_058528.1, NP_058537.1 >RGSV SEQ ID NO: 440
MALLQKLGSSKVSSKRMSPAMIPLDSINQDLVDPQQEKDAKNKKEGKKKDLDVSMDPLTGKLPLGKKKQVDTGGIAYLENALMQLDLHD
FSFDSIRPRTKTFHMKRQHFKISTVNSRFRLDVEKTGLFSKTLKYSRICTLCLAFLGIKNRAQGTISFTFRDLSYLSENDQIDFKVKNRISKSF
SAIASFPAPIFNDDLGNLICDFEIENASVNGVVIGDLLVLLGIEQSDLPVCYEPQKAKIFEYKPLTEKGLNKISNFAGYVDNVLKAAINHREGE
DDGFSTEGLGVLVHPRVKQIDNSIPIKSLENKPQKMLMRDGSYLDVNPMGKVQFGDGHWANNKEWSELLSEIFSKIRASIDGFANATADL
AAGLEYQAFNPEKILRKLIASSTSLDDFVKDMRDLLVARYTRGTSFLFNAKNSIEKAKDKKKAEAIQVLINRYGVKKNAGDNAVDQATLGR
ISQVLAYMALRVALQITDYHKPIIPLRPISTVDIKNAIIDVVPQFLYLKADQLDSKTNSEAALYVIHLCYQVCVSERIMTKAQKDKHSVHTKS
AMITHCMGFVNLAMDNSSVVSDDKIAGRRMISGPWGLQETALDATGCACIIDVVDFCCRGHKVTDAVAPVRLFRLAIECIKDTADLKDAG
VKLKTLVDKMNTNCQFSNISYLHNMNNEIVGVERFKYNDVEYDINGSLVDCFYKGAETIPTPSPNLKCFFNALCLCLRVESKDYIKVMNKL
RNQYYAMSIWTASELKELLRELDPNDSYMATYYSIIHVSICLDICICIHDETWDSHCKTFGDRSKLMIHMKLESRHYEAIDDPTYDYFELSS
VLGGYLGSLDDDIDLPSMIELKVETKPLGDVFTERGQWYNSLASLAESNLHQQVPQFNCNLFSSIVRLKKYSRQQEVAMLSLNLGMTIEVR
LLSYHENLYSLEGGFKCVGPGNGLLELIYDGSTNKWFFLKISGLLEVDQNYQVLEKVHDLESLIRQLTQSFVQPSNWYSNKLKMIEKCKTIF
PQRREVDYEPFLNKNKLLSLCFLSKELENLLTILLVDNDMVNVGTILKPKIYKYWGQNPELTKKQKHFLLDSEGNLWGAVKSGLPVTVLR
DDQYDKDFPTLSFSRKTAEFLFTSYDDDIQKLTNPEHSGYDESMYGLYEMHPRLKVPETSEIVSPDETEIVISFENRFGNRKYHDFPSIPDN
RAYSCKISTVKNIVHDFTFALFGDDLDVSFTDAGLFIPGDPDNNKTPDMIIKHGEKHYSVIEFTTRNTNMRPDVRSRGWEDKTLKYRDAI
HNRRDHFKISIDYYIIVVCQNGVQTNLMNLPTETMDELIYRYKLARQIALQIEQNLEYDIKADQAMKMEISSIKKIIEGIRIHKEDGELDPSK
FIKPYTMAHYTKAVGTLESEDYDYLHKLDTYVSNKSMRKMEKLKHLNDVNIRAYRDEIRNESILMMQSRKMEYESNFIKNEEAYRTSNE
ASVQLPMLVPKIVRVVGVSNTHEEVRNVVDEIISTSSMSSTEEAWKQGICGFMHYLYEIEDGKSDFSLAMEEPTLSTQMEDDLKKIRNKFN
RISMVFDMDDRIDLAKIGINGKKYSKDPEVLAYRNESKKPFSLFTSTDDIERFINEECLQLFTPHDQELDNSVLDLISDSLKIHGCSSQSRLL
ESLDTYLKSKAYLFTKFVSDLAVELSISVKQNCQPREFIVKRLRDFQVYVLIKSTGSDGKVFFSLLFREDQELSKIINTTFKKVSKLGDRFLYT
DFISVNYSKLVNWTRCESLMLSLYAFWREQYNIPPNIGISSIPDEDFNSDYLKMWANCLLVLLNDKHQTEEVITSTRFIHMEAFVETPNW
PKPHKMFEKLSTIPRSRLEVFYIKSAIKLMECYTETPIRLDNSGPMRRWYNIKNPFVTENGSLSNFPNHDVMLSSMYLGYLKNKDEDPED
NASGQLISKILGYEDKLPRGEDKKYLGLEDPPVDQCSTHMYSISLVKRMCDSFLGRLKSETGVSDPKDYLSTLCLEYLSHEFLESFVTLKASS
NFSAEYYEYRPNENKRSRPQTVNEDLPKSESNRRNYGRSKVIEKIQTILTKKDPNEKYRLVVDLLKESLEEVEKNACLHVCIFRKNQHGGL
REIYVLNIYERIVQKCVEDLARAILSVVPSETMTHPKNKFQIPNKHNIAARKEFGDSYFTVCTSDDASKWNQGHHVSKFITILVRILPKFWH
GFIVRALQLWFHKRLFLGDDLLRLFCANDVLNTTDEKVKKVHEVFKGREVAPWMTRGMTYIETESGFMQGILHYISSLFHAIFLEDLAER
QKKQLPQMARIIQPDNESNVIIDCMESSDDSSMMISFSTKSMNDRQTFAMLLLVDRAFSLKEYYGDMLGIYKSIKSTTGTIFMMEFNIEFFF
AGDTHRPTIRWVNAALNVSEQETLIASQEEMSNTLKDILEGGGTFYHTFVTQVAQAMLHYRMYGSSVSPLWGSYCSMIKLSKDPALGYFL
MDHPMASGLMGFGYNLWKTCKQSFLSVKYADMLNLEFNTENSKRKMTPDIANLGVLSRTTTVGFGNKTKWMKMCDRMHLTDDIFDSI
EQNPRILFFHAKNAEEMQQKIAIKMRSPGVMQSLAKTNTLGRRVASSVYFISRNVLFSMSAGVETDEKRKTSIFRELLNSNSNVVSKIGQK
EAQIPGVQSLTEEPSDDFYSVEGLREGVIKMVSVLTDLTMEQSERLLSEKFGLTLDDTKLNDWFIDENKLMHKLSKGFGINIHVYISRDPEA
SFKLCHTFKCLTNSENLYFMLNPNYLLVRRQESSSMSDEHRRQIQESYKEIQSLFPEETDYLEIESNLSSLNLNMARSGINQRRRVRSQIQL
TGTEQSSTFSVYSVAKFIWFGEKDVPAHPKTLKIVWKKYKETWLWLRDTIGDTLVGSPFVSYIQLNNYLSRVSTKGRVLHFVGTMGKASS
GNVNLMTLIRNNFSNGIVFSGGFTDVIKKEKTEDYKSLLSNLTMLNQSPLKYEEKLVAMTDLIVDNKDLEYSTSMLGSKRNKLAIIQMFLR
TDPDLKFSGDYNTQDAVNLVEHHLGEFDQNLSLGGFRSLIRMGQLVEKELLDSGMGYEELEKNFEDLTINSLSASARRAYCQYIYCDRVLE
DAYQQYNKRKPTQKMLLSLELLKAEAANDPTRNWLTMIGHRIVKSSYDLMKLRDEAKYCRRDIMEKIRIGNLGLLGGYVQKQSYNREEK
KYFGPGVWRGYLHDVAVQIEVNSDQNMESYIKSVSLSSAMHLSDTIQSLKEWSREHRVGNSHYTMAYGNRDCEMLGRMFEFRRVQMSD
RDGCPIVLDPKLIIHQPFLSDSFCIDITDHSIRLLQECTGERAPYTTVLTVHLSKKDVITSELQSQQNVNMIKRLKMDDWLKDWILWRDQR
APTSLFTQMNLGQFPDLVDEKRLKSWCRELFESSLGYQKIVQLSKLSKAARDRLAHDYPESIQEDKEVCEELESMESLLTRISQAYKTIDM
TIKDEDLEHLYELARDLAEEQDEIQMEKEAVNVSLFHKMELSSVRKMDTFMGTDDLRLTMNIIKGESRQKLPASSMHYKRILQFMYDVP
DSQFPTYNPPSSRGRGRRGRGRSYMEMSKSHSDVVGTVSGLNYRLFYDMIPDRISQKLRLREITDPKTCNASKIPLVLICAAEEVSRMDIDH
DKDGYTKVQVKMPEYMKAYLEEMLSASNSTTTGISYSVFLVYMQDKCGDWITEHYLKNVHSMSKQQLHELITGIIETESSDDIEDEHYDD
LICKIPAYVYNIVLRYIDMSGLTT
NP_619743.1, NP_619742.1, NP_619740.1>PMMV SEQ ID NO: 441
MAYTVSSANQLVYLGSVWADPLELQNLCTSALGNQFQTQQARTTVQQQFSDVWKTIPTATVRFPATGFKVFRYNAVLDSLVSALLGAFD
TRNRIIEVENPQNPTTAETLDATRRVDDATVAIRASISNLMNELVRGTGMYNQALFESASGLTWATTPMALVVKDDVKISEFINLSAAEK
FLPAVMTSVKTVRISKVDKVIAMENDSLSDVNLLKGVKLVKDGYVCLAGLVVSGEWNLPDNCRGGVSVCLVDKRMQRDDEATLGSYRTS
AAKKRFAFKLIPNYSITTADAERKVWQVLVNIRGVAMEKGFCPLSLEFVSVCIVHKSNIKLGLREKITSVSEGGPVELTEAVVDEFIESVPM
ADRLRKFRNQSKKGSNKYVGKRNDNKGLNKEGKLFDKVRIGQNSESSDAESSSFMAYTQQATNAALASTLRGNNPLVNDLANRRLYESA
VEQCNAHDRRPKVNFLRSISEEQTLIATKAYPEFQITFYNTQNAVHSLAGGLRSLELEYLMMQIPYGSTTYDIGGNFAAHMFKGRDYVHCC
MPNMDLRDVMRHNAQKDSIELYLSKLAQKKKVIPPYQKPCFDKYTDDPQSVVCSKPFQHCEGVSHCTDKVYAVALHSLYDIPADEFGAA
LLRRNVHVCYAAFHFSENLLLEDSYVSLDDIGAFFSREGDMLNESEVAESTLNYTHSYSNVLKYVCKTYFPASSREVYMKEFLVTRVNTWF
CKFSRLDTFVLYRGVYHRGVDKEQFYSAMEDAWHYKKTLAMMNSERILLEDSSSVNYWFPKMKDMVIVPLEDVSLQNEGKRLARKEVM
VSKDEVYTVLNHIRTYQSKALTYANVLSFVESIRSRVIINGVTARSEWDVDKALLQSLSMTFELQTKLAMLKDDLVVQKFQVHSKSLTEYV
WDEITAAFHNCEPTIKERLINKKLITVSEKALEIKVPDLYVITHDRLVKEYKSSVEMPVLDVKKSLEEAEVMYNALSEISILKDSDKFDVDV
FSRMCNTLGVDPLVAAKVMVAVVSNESGLTLTFERPTEANVALALQPTITSKEEGSLKIVSSDVGESSIKEVVRKSEISMLGLTGNTVSDEF
QRSTEIESLQQFHMVSTETIIRKQMHAMVYTGPLKVQQCKNYLDSLVASLSAAVSNLKKIIKDTAAIDLETKEKEGVYDVCLKKWLVKPLS
KGHAWGVVMDSDYKCEVALLTYDGENIVCGETWRRVAVSSESLVYSDMGKIRAIRSVLKDGEPHISSAKVTLVDGVPGCGKTKEILSRVNF
DEDLVLVPGKQAAEMIRRRANSSGLIVATKENVRTVDSFLMNYGRGPCQYKRLFLDEGLMLHPGCVNELVGMSLCSEAFVYGDTQQIPYI
NRVATFPYPKHLSQLEVDAVETRRTTLRCPADITFELNQKYEGQVMCTSSVTRSVSHEVIQGAAVMNPVSKPLKGKVITFTQSDKSLLLSR
GYEDVHTVHEVQGETFEDVSLVRLTPTPVGIISKQSPHLLVSLSRHTRSIKYYTVVLDAVVSVLRDLECVSSYLLDMYKVDVSTQXQLQIES
VYKGVNLEVAAPKTGDVSDMQYYYDKCLPGNSTILNEYDAVTMQIRENSLNVKDCVLDMSKSVPLPRESETTLKPVIRTAAEKPRKPGLL
ENLVAMIKRNENSPELVGVVDIEDTASLVVDKFFDAYLIKEKKKPKNIPLLSRASLERWIEKQEKSTIGQLADFDFIDLPAVDQYRHMIKQQ
PKQRLDLSIQTEYPALQTIVYHSKKINALFGPVFSELTRQLLETIDSSRFMFYTRKTPTQIEEFFSDLDSNVPMDILELDISKYDKSQNEFHC
AVEYEIWKRLGLDDFLAEVWKHGHRKTTLKDYTAGIKTCLWYQRKSGDVTTFIGNTIIIAACLSSMLPMERLIKGAFCGDDSILYFPKGTD
FPDIQQGANLLWNFEAKLERKRYGYFCGRYIIHHDRGCIVYYDPLKLISKLGAKHIKNREHLEEFRTSLCDVAGSLNNCAYYTHLNDAVGE
VIKTAPLGSFVYRALVKYLCDKRLFQTLFLE
NP_056729.1, NP_056727.1, NP_056725.1, NP_056728.1, NP_056726.1, NP_056724.1>CMV
SEQ ID NO: 442
MENIEKLLMQEKILMLELDLVRAKISLARANGSSQQGDLSLHRETPEKEEAVHSALATFTPSQVKAIPEQTAPGKESTNPLMANILPKDM
NSVQTEIRPVKPSDFLRPHQGIPIPPKPEPSSSVAPLRDESGIQHPHTNYYVVYNGPHAGIYDDWGCTKAATNGVPGVAHKKFATITEARA
AADAYTTSQQTDRLNFIPKGEAQLKPKSFAKALTSPPKQKAHWLMLGTKKPSSDPAPKEISFAPEITMDDFLYLYDLVRKFDGEGDDTMF
TTDNEKISLENFRKNANPQMVREAYAAGLIKTIYPSNNLQEIKYLPKKVKDAVKRFRTNCIKNTEKDIFLKIRSTIPVWTIQGLLHKPRQVI
EIGVSKKVVPTESKAMESKIQIEDLTELAVKTGEQFIQSLLRLNDKKKIFVNMVEHDTLVYSKNIKDTVSEDQRAIETFQQRVISGNLLGFH
CPAICHFIVKIVEKEGGSYKCHHCDKGKAIVEDASADSGPKDGPPPTRSIVEKEDVPTTSSKQVDMSITGQPHVYKKDTHRLKPLSLNSNNR
SYVFSSSKGNIQNIINHLNNLNEIVGRSLLGIWKINSYFGLSKDPSESKSKNPSVFNTAKTIFKSGGVDYSSQLKEIKSLLEAQNTRIKSLEKAI
QSLENKIEPEPLTKEEVKELKESINSIKEGLKNIIGMDHLLLKTQTQTEQVMNVTNPNSIYIKGRLYFKGYKKIELHCFVDTGASLCIASKEVI
PEEHWVNAERPIMVKIADGSSITISKVCKDIDLIIAGEIFRIPTVYQQESGIDFIIGNNECQLYEPFIQFTDRVIFTKNKSYPVHIAKLTRAVRV
GTEGFLESMKKRSKTQQPEPVNISTNKIENPLEEIAILSEGRRLSEEKLFITQQRMQKIEELLEKVCSENPLDPNKTKQWMKASIKLSDPSK
AIKVKPMKYSPMDREEFDKQIKELLDLKVIKPSKSPHMAPAFLVNNEAEKRRGKKRMVVNYKAMNKATVGDAYNLPNKDELLTLIRGKK
IFSSEDCKSGFWQVLLDQESRPLTAFTCPQGHYEWNVVPFGLKQAPSIFQRHMDEAFRVFRKFCCVYVDDILVFSNNEEDHLLHVAMILQ
KCNQHGIILSKKKAQLFKKKINFLGLEIDEGTHKPQGHILEHINKFPDTLEDKKQLQRFLGILTYASDYIPKLAQIRKPLQAKLKENVPWRW
TKEDTLYMQKVKKNLQGFPPLHHPLPEEKLIIETDASDDYWGGMLKAIKINEGTNTELICRYASGSFKAAEKNYHSNDKETLAVINTIKKF
SIYLTPVHFLIRTDNTHFKSFVNLNYKGDSKLGRNIRWQAWLSHYSFDVEHIKGTDNHFADFLSREFNKVNSMANLNQIQKEVSEILSDQ
KSMKADIKAILELLGSQNPIKESLETVAAKIVNDLTKLINDCPCNKEILEALGTQPKEQUEQPKEKGKGLNLGKYSYPNYGVGNEELGSSGN
PKALTWPFKAPAGWPNQFMDLYPEENTQSEQSQNSENNMQIFKSENSDGFSSDLMISNDQLKNISKTQLTLEKEKIFKMPNVLSQVMKK
AFSRKNEILYCVSTKELSVDIHDATGKVYLPLITKEEINKRLSSLKPEVRKTMSMVHLGAVKILLKAQFRNGIDTPIKIALIDDRINSRRDCLL
GAAKGNLAYGKFMFTVYPKFGISLNTQRLNQTLSLIHDFENKNLMNKGDKVMTITYVVGYALTNSHHSIDYQSNATIELEDVFQEIGNVQ
QSEFCTIQNDECNWAIDIAQNKALLGAKTKTQIGNNLQIGNSASSSNTENELARVSQNIDLLKNKLKEICGE
NP_604483.1, NP_604479.1, NP_604477.1, NP_604480.1, NP_604478.1 >BBTV SEQ ID NO: 443
MARYVVCWMFTINNPTTLPVMRDEIKYMVYQVERGQEGTRHVQGYVEMKRRSSLKQMRGFFPGAHLEKRKGSQEEARSYCMKEDTRIE
GPFEFGSFKLSCNDNLFDVIQDMRETHKRPLEYLYDCPNTFDRSKDTLYRVQAEMNKTKAMNSWRTSFSAWTSEVENIMAQPCHRRII
WVYGPNGGEGKTTYAKHLMKTRNAFYSPGGKSLDICRLYNYEDIVIFDIPRCKEDYLNYGLLEEFKNGIIQSGKYEPVLKIVEYVEVIVMAN
FLPKEGIFSEDRIKLVSCMDWAESQFKTCTHGCDWKKISSDSADNRQYVPCVDSGAGRKSPRKVLLRSIEAVFNGSFSGNNRNVRGFLYVS
IRDDDGEMRPVLIVPFGGYGYHNDFYYFEGKGKVECDISSDYVAPGIDWSRDMEVSISNSNNCNELCDLKCYVVCSLRIKEMFRQEMARYP
KKSIKKRRVGRRKYGSKAATSHDYSSSGSILVPENTVKVFRIEPTDKTLPRYFIWKMFMLLVCKVKPGRILHWAMIKSSWEINQPTTCLEA
PGLFIKPEHSHLVKLVCSGELEAGVATGTSDVECLLRKTTVLRKNVTEVDYLYLAFYCSSGVSINYQNRITYHVMEFWESSAMPDDVKREI
KEIYWEDRKKLLFCQKLKSYVRRILVYGDQEDALAGVKDMKTSIIRYSEYLKKPCVVICCVSNKSIVYRLNSMVFFYHEYLEELGGDYSVYQ
DLYCDEVLSSSSTEEEDVGVIYRNVIMASTQEKFSWSDCQQIVISDYDVTLLMALTTERVKLFFEWFLFFGAIFIAITILYILLVLLFEVPRYIK
ELVRCLVEYLTRRRVWMQRTQLTEATGDVEIGRGIVEDRRDQEPAVIPHVSQVIPSQPNRRDDQGRRGNAGPMF
AAL40183.1>Calpain SEQ ID NO: 444
MPTVISASVAPRTAAEPRSPGPVPHPAQSKATEAGGGNPSGIYSAIISRNEPHGVKEKTFEQLHKKCLEKKVLYVDPEFPPDETSLFYSQKF
PIQFVWKRPPEICENPRFIIDGANRTDICQGELGDCWFLAAIACLTLNQHLLFRVIPHDQSFIENYAGIFHFQFWRYGEWVDVVIDDCLPTY
NNQLVFTKSNHRNEFWSALLEKAYAKLHGSYEALKGGNTTEAMEDFTGGVAEFFEIRDAPSDMYKIMKKAIERGSLMGCSIDDGTNMTY
GTSPSGLNMGELIARMVRNMDNSLLQDSDLDPRGSDERPTRTIIPVQYETRMACGLVRGHAYSVTGLDEVPFKGEKVKLVRLRNPWGQV
EWNGSWSDRWKDWSFVDKDEKARLQHQVTEDGEFWMSYEDFIYHFTKLEICNLTADALQSDKLQTWTVSVNEGRWVRGCSAGGCRN
FPDTFWTNPQYRLKLLEEDDDPDDSEVICSFLVALMQKNRRKDRKLGASLFTIGFAIYEVPKEMHGNKQHLQKDFFLYNASKARSKTYIN
MREVSQRFRLPPSEYVIVPSTYEPHQEGEFILRVFSEKRNLSEEVENTISVDRPVKKKKTKPIIFVSDRANSNKELGVDQESEEGKGKTSPD
KQKQSPQPQPGSSDQESEEQQQFRNIFKQIAGDDMEICADELKKVLNTVVNKHKDLKTHGFTLESCRSMIALMDTDGSGKLNLQEFHHL
WNKIKAWQKIFKHYDTDQSGTINSYEMRNAVNDAGEHLNNQLYDIITMRYADKHMNIDEDSFICCFVRLEGMFRAFHAFDKDGDGIIKL
NVLEWLQLTMYA
NP_150634.1>Caspase1 SEQ ID NO: 445
MADKVLKEKRKLFIRSMGEGTINGLLDELLQTRVLNKEEMEKVKRENATVMDKTRALIDSVIPKGAQACQICITYICEEDSYLAGTLGLSA
DQTSGNYLNMQDSQGVLSSFPAPQAVQDNPAMPTSSGSEGNVKLCSLEEAQRIWKQKSAEIYPIMDKSSRTRLALIICNEEFDSIPRRTGA
EVDITGMTMLLQNLGYSVDVKKNLTASDMTTELEAFAHRPEHKTSDSTELVFMSHGIREGICGKKHSEQVPDILQLNAIFNMLNTKNCPS
LKDKPKVIIIQACRGDSPGVVWFKDSVGVSGNLSLPTTEEFEDDAIKKAHIEKDFIAFCSSTPDNVSWRHPTMGSVFIGRLIEHMQEYACSC
DVEEIFRKVRFSFEQPDGRAQMPTTERVTLTRCFYLFPGH
NP_001158286.1>Caspase 2 SEQ ID NO: 446
MWRRKHPRTSGGTRGVLSGNRGVEYGSGRGHLGTFEGRWRKLPKMPEAVGTDPSTSRKMAELEEVTLDGKPLQALRVTDLKAALEQR
GLAKSGQKSALVKRLKGALMLENLQKHSTPHAAFQPNSQIGEEMSQNSFIKQYLEKQQELLRQRLEREAREAAELEEASAESEDEMIHPE
GVASLLPPDFQSSLERPELELSRHSPRKSSSISEEKGDSDDEKPRKGERRSSRVRQARAAKLSEGSQPAEEEEDQETPSRNLRVRADRNLKT
EEEEEEEEEEEEDDEEEEGDDEGQKSREAPILKEFKEEGEEIPRVKPEEMMDERPKTRSQEQEVLERGGRFTRSQEEARKSHLARQQQEK
EMKTTSPLEEEEREIKSSQGLKEKSKSPSPPRLTEDRKKASLVALPEQTASEEETPPPLLTKEASSPPPHPQLHSEEEIEPMEGPAPPVLIQL
SPPNTDADTRELLVSQHTVQLVGGLSPLSSPSDTKAESPAEKVPEESVLPLVQKSTLADYSAQKDLEPESDRSAQPLPLKIEELALAKGITE
ECLKQPSLEQKEGRRASHTLLPSHRLKQSADSSSSRSSSSSSSSSRSRSRSPDSSGSRSHSPLRSKQRDVAQARTHANPRGRPKMGSRSTSES
RSRSRSRSRSASSNSRKSLSPGVSRDSSTSYTETKDPSSGQEVATPPVPQLQVCEPKERTSTSSSSVQARRLSQPESAEKHVTQRLQPERGSP
KKCEAEEAEPPAATQPQTSETQTSHLPESERIHHTVEEKEEVTMDTSENRPENDVPEPPMPIADQVSNDDRPEGSVEDEEKKESSLPKSF
KRKISVVSTKGVPAGNSDTEGGQPGRKRRWGASTATTQKKPSISITTESLKEAVVDLHADDSRISEDETERNGDDGTHDKGLKICRTVTQV
VPAEGQENGQREEEEEEKEPEAEPPVPPQVSVEVALPPPAEHEVKKVTLGDTLTRRSISQQKSGVSITIDDPVRTAQVPSPPRGKISNIVHIS
NLVRPFTLGQLKELLGRTGTLVEEAFWIDKIKSHCFVTYSTVEEAVATRTALHGVKWPQSNPKFLCADYAEQDELDYHRGLLVDRPSETK
TEEQGIPRPLHPPPPPPVQPPQHPRAEQREQERAVREQWAEREREMERRERTRSEREWDRDKVREGPRSRSRSRDRRRKERAKSKEKK
SEKKEKAQEEPPAKLLDDLERKTKAAPCIYWLPLTDSQIVQKEAERAERAKEREKRRKEQEEEEQKEREKEAERERNRQLEREKRREHS
RERDRERERERERDRGDRDRDRERDRERGRERDRRDTKRHSRSRSRSTPVRDRGGRR
NP_004337.2>Caspase3 SEQ ID NO: 447
MENTENSVDSKSIKNLEPKIIHGSESMDSGISLDNSYKMDYPEMGLCIIINNKNFHKSTGMTSRSGTDVDAANLRETERNLKYEVRNKNDL
TREEIVELMRDVSKEDHSKRSSFVCVLLSHGEEGIIFGTNGPVDLKKITNFFRGDRCRSLTGKPKLFIIQACRGTELDCGIETDSGVDDDMA
CHKIPVEADFLYAYSTAPGYYSWRNSKDGSWFIQSLCAMLKQYADKLEFMHILTRVNRKVATEFESFSFDATFHAKKQIPCIVSMLTKELY
FYH
NP_001216.1>Caspase4 SEQ ID NO: 448
MAEGNHRKKPLKVLESLGKDFLTGVLDNLVEQNVLNWKEEEKKKYYDAKTEDKVRVMADSMQEKQRMAGQMLLQTFFNIDQISPNKK
AHPNMEAGPPESGESTDALKLCPHEEFLRLCKERAEEIYPIKERNNRTRLALIICNTEFDHLPPRNGADFDITGMKELLEGLDYSVDVEEN
LTARDMESALRAFATRPEHKSSDSTFLVLMSHGILEGICGTVHDEKKPDVLLYDTIFQIFNNRNCLSLKDKPKVIIVQACRGANRGELWVR
DSPASLEVASSQSSENLEEDAVYKTHVEKDFIAFCSSTPHNVSWRDSTMGSIFITQLITCFQKYSWCCHLEEVFRKVQQSFETPRAKAQMP
TIERLSMTRYFYLFPGN
NP_004338.3>Caspase5 SEQ ID NO: 449
MAEDSGKKKRRKNFEAMFKGILQSGLDNFVINHMLKNNVAGQTSIQTLVPNTDQKSTSVKKDNHKKKTVKMLEYLGKDVLHGVFNYLA
KHDVLTLKEEEKKKYYDTKIEDKALILVDSLRKNRVAHQMFTQTLLNMDQKITSVKPLLQIEAGPPESAESTNILKLCPREEFLRLCKKNH
DEIYPIKKREDRRRLALIICNTKEDHLPARNGAHYDIVGMKRLLQGLGYTVVDEKNLTARDMESVLRAFAARPEHKSSDSTFLVLMSHGIL
EGICGTAHKKKKPDVLLYDTIFQIENNRNCLSLKDKPKVIIVQACRGEKHGELWVRDSPASLALISSQSSENLEADSVCKIHEEKDFIAFCSS
TPHNVSWRDRTRGSIFITELITCFQKYSCCCHLMEIFRKVQKSFEVPQAKAQMPTIERATLTRDFYLFPGN
AAD24962.1>Caspase8 SEQ ID NO: 450
MDFSRNLYDIGEQLDSEDLASLKELSLDYIPQRKQEPIKDALMLFQRLQEKRMLEESNLSFLKELLFRINRLDLLITYLNTRKEEMERELQT
PGRAQISAYRVMLYQISEEVSRSELRSFKFLLQEEISKCKLDDDMNLLDIFIEMEKRVILGEGKLDILKRVCAQINKSLLKIINDYEEFSKERSS
SLEGSPDEFSNGEELCGVMTISDSPREQDSESQTLDKVYQMKSKPRGYCLIINNHNFAKAREKVPKLHSIRDRNGTHLDAGALTTTFEELH
FEIKPHDDCTVEQIYDILKIYQLMDHSNMDCFICCILSHGDKGIIYGTDGQEPPIYELTSQFTGLKCPSLAGKPKVFFIQACQGDNYQKGIPVE
TDSEEQPYLEMDLSSPQTRYIPDEADFLLGMATVNNCVSYRNPAEGTWYIQSLCQSLRERCPRGDDILTILTEVNYEVSNKDDKKNMGKQ
MPQPTFTLRKKLVFPSD
NP_116759.2>Caspase10 SEQ ID NO: 451
MKSQGQHWYSSSDKNCKVSFREKLLIIDSNLGVQDVENLKFLCIGLVPNKKLEKSSSASDVFEHLLAEDLLSEEDPFFLAELLYIIRQKKLLQ
HLNCTKEEVERLLPTRQRVSLERNLLYELSEGIDSENLKDMIFLLKDSLPKTEMTSLSFLAFLEKQGKIDEDNLTCLEDLCKTVVPKLLRNI
EKYKREKAIQIVTPPVDKEAESYQGEEELVSQTDVKTFLEALPQESWQNKHAGSNGNRATNGAPSLVSRGMQGASANTLNSETSTKRAA
VYRMNRNHRGLCVIVNNHSFTSLKDRQGTHKDAEILSHVFQWLGFTVHIHNNVTKVEMEMVLQKQKCNPAHADGDCFVFCILTHGRFG
AVYSSDEALIPIREIMSHETALQCPRLAEKPKLFFIQACQGEEIQPSVSIEADALNPEQAPTSLQDSIPAEADFLLGLATVPGYVSFRHVEEGS
WYIQSLCNHLKKLVPRHEDILSILTAVNDDVSRRVDKQGTKKQMPQPAFTLRKKLVFPVPLDALSL
NP_001020330.1>CD74 SEQ ID NO: 452
MHRRRSRSCREDQKPVMDDQRDLISNNEQLPMLGRRPGAPESKCSRGALYTGFSILVTLLLAGQATTAYFLYQQQGRLDKLTVTSQNLQL
ENLRMKLPKPPKPVSKMRMATPLLMQALPMGALPQGPMQNATKYGNMTEDHVMHLLQNADPLKVYPPLKGSFPENLRHLKNTMETI
DWKVFESWMHHWLLFEMSRHSLEQKPTDAPPKVLTKCQEEVSHIPAVHPGSFRPKCDENGNYLPLQCYGSIGYCWCVFPNGTEVPNTR
SRGHHNCSESLELEDPSSGLGVTKQDLGPVPM
CAG33019.1>FADD SEQ ID NO: 453
MDPFLVLLHSVSSSLSSSELTELKFLCLGRVGKRKLERVQSGLDLFSMLLEQNDLEPGHTELLRELLASLRRHDLLRRVDDFEAGAAAGAA
PGEEDLCAAFNVICDNVGKDWRRLARQLKVSDTKIDSIEDRYPRNLTERVRESLRIWKNTEKENATVAHLVGALRSCQMNLVADLVQEV
QQARDLQNRSGAMSPMSWNSDASTSEAS
AAH12479.1>Fas SEQ ID NO: 454
MLGIWTLLPLVLTSVARLSSKSVNAQVTDINSKGLELRKTVTTVETQNLEGLHHDGQFCHKPCPPGERKARDCTVNGDEPDCVPCQEGKE
YTDKAHESSKCRRCRLCDEGHGLEVEINCTRTQNTKCRCKPNFECNSTVCEHCDPCTKCEHGIIKECTLTSNTKCKEEGSRSNLGWLCLLL
LPIPLIVWVKRKEVQKTCRKHRKENQGSHESPTLNPETVAINLSDVDLSKYITTIAGVMTLSQVKGEVRKNGVNEAKIDEIKNDNVQDTAE
QKVQLLRNWHQLHGKKEAYDTLIKDLKKANLCTLAEKIQTIILKDITSDSENSNFRNEIQSLV
AAO43991.1>FasL SEQ ID NO: 455
MQQPFNYPYPQIYWVDSSASSPWAPPGTVLPCPTSVPRRPGQRRPPPPPPPPPLPPPPPPPPLPPLPLPPLKKRGNHSTGLCLLVMFFMV
LVALVGLGLGMFQLFHLQKELAELRESTSQMHTASSLEKQIGHPSPPPEKKELRKVAHLTGKSNSRSMPLEWEDTYGIVLLSGVKYKKGG
LVINETGLYFVYSKVYFRGQSCNNLPLSHKVYMRNSKYPQDLVMMEGKMMSYCTTGQMWARSSYLGAVFNLTSADHLYVNVSELSLVNF
EESQTFFGLYKL
AAA75490.1>GranB SEQ ID NO: 456
[sequence omitted]
NP_003795.2>Rip1 SEQ ID NO: 457
MQPDMSLNVIKMKSSDFLESAELDSGGFGKVSLCFHRTQGLMIMKTVYKGPNCIEHNEALLEEAKMMNRLRHSRVVKLLGVIIEEGKYSL
VMEYMEKGNLMHVLKAEMSTPLSVKGRIILEHEGMCYLHGKGVIHKDLKPENILVDNDFHIKIADLGLASFKMWSKLNNEEHNELREVD
GTAKKNGGTLYYMAPEHLNDVNAKPTEKSDVYSFAVVLWAIFANKEPYENAICEQQLIMCIKSGNRPDVDDITEYCPREIISLMKLCWEA
NPEARPTFPGIEEKFRPFYLSQLEESVEEDVKSLKKEYSNENAVVKRMQSLQLDCVAVPSSRSNSATEQPGSLHSSQGLGMGPVEESWFAP
SLEHPQEENEPSLQSKLQDEANYHLYGSRMDRQTKQQPRQNVAYNREEERRRRVSHDPFAQQRPYENFQNTEGKGTAYSSAASHGNAV
HQPSGLTSQPQVLYQNNGLYSSHGEGTRPLDPGTAGPRVWYRPIPSHMPSLHNIPVPETNYLGNTPTMPFSSLPPTDESIKYTIYNSTGIQI
GAYNYMEIGGTSSSLLDSTNTNEKEEPAAKYQAIEDNTTSLTDKHLDPIRENLGKHWKNCARKLGFTQSQIDEIDHDYERDGLKEKVYQM
LQKWVMREGIKGATVGKLAQALHQCSRIDLLSSLIYVSQN
NP_003812.1>Rip2 SEQ ID NO: 458
MNGEAICSALPTIPYHKLADLRYLSRGASGTVSSARHADWRVQVAVKHLHIHTPLLDSERKDVLREAEILHKARFSYILPILGICNEPEFLGI
VTEYMPNGSLNELLHRKTEYPDVAWPLRFRILHEIALGVNYLHNMTPPLLHHDLKTQNILLDNEFHVKIADEGLSKWRMMSLSQSRSSK
SAPEGGTIIYMPPENYEPGQKSRASIKHDIYSYAVITWEVLSRKQPFEDVTNPLQIMYSVSQGHRPVINEESLPYDIPHRARMISLIESGWAQ
NPDERPSFLKCLIELEPVLRTFEEITFLEAVIQLKKTKLQSVSSAIHLCDKKKMELSLNIPVNHGPQEESCGSSQLHENSGSPETSRSLPAPQ
DNDELSRKAQDCYFMKLHHCPGNHSWDSTISGSQRAAFCDHKTTPCSSAIINPLSTAGNSERLQPGIAQQWIQSKREDIVNQMTEACLNQ
SLDALLSRDLIMKEDYELVSTKPTRTSKVRQLLDTTDIQGEEFAKVIVQKLKDNKQMGLQPYPEILVVSRSPSLNLLQNKSM
NP_006862.2>Rip3 SEQ ID NO: 459
MSCVKLWPSGAPAPLVSIEELENQELVGKGGFGTVFRAQHRKWGYDVAVKIVNSKAISREVKAMASLDNEFVLRLEGVIEKVNWDQDPK
PALVTKFMENGSLSGLLQSQCPRPWPLLCRLLKEVVLGMFYLHDQNPVLLHRDLKPSNVLLDPELHVKLADEGLSTFQGGSQSGTGSGEP
GGTLGYLAPELFVNVNRKASTASDVYSEGILMWAVLAGREVELPTEPSLVYEAVCNRQNRPSLAELPQAGPETPGLEGLKELMQLCWSSE
PKDRPSFQECLPKTDEVFQMVENNMNAAVSTVKDELSQLRSSNRRESIPESGQGGTEMDGFRRTIENQHSRNDVMVSEWLNKLNLEEPP
SSVPKKCPSLTKRSRAQEEQVPQAWTAGTSSDSMAQPPQTPETSTFRNQMPSPTSTGTPSPGPRGNQGAERQGMNWSCRTPEPNPVTG
RPLVNIYNCSGVQVGDNNYLTMQQTTALPTWGLAPSGKGRGLQHPPPVGSQEGPKDPEAWSRPQGWYNHSGK
NP_008850.1>SerpinB3 SEQ ID NO: 460
MNSLSEANTKFMFDLFQQFRKSKENNIFYSPISITSALGMVLLGAKDNTAQQIKKVLHFDQVTENTTGKAATYHVDRSGNVHHQFQKLLT
EFNKSTDAYELKIANKLFGEKTYLFLQEYLDAIKKFYQTSVESVDFANAPEESRKKINSWVESQTNEKIKNLIPEGNIGSNTTLVLVNAIYFK
GQWEKKFNKEDTKEEKFWPNKNTYKSIQMMRQYTSFHFASLEDVQAKVLEIPYKGKDLSMIVLLPNEIDGLQKLEEKLTAEKLMEWTSL
QNMRETRVDLHLPRFKVEESYDLKDTLRTMGMVDIFNGDADLSGMTGSRGLVLSGVLHKAFVEVTEEGAEAAAATAVVGFGSSPTSTNE
EFHCNHPFLFFIRQNKTNSILFYGRFSSP
NP_002965.1>SerpinB4 SEQ ID NO: 461
MNSLSEANTKFMFDLFQQFRKSKENNIFYSPISITSALGMVLLGAKDNTAQQISKVLHEDQVTENTTEKAATYHVDRSGNVHHQFQKLLT
EFNKSTDAYELKIANKLFGEKTYQFLQEYLDAIKKEYQTSVESTDFANAPEESRKKINSWVESQTNEKIKNLEPDGTIGNDTTLVLVNAIYF
KGQWENKFKKENTKEEKEWPNKNTYKSVQMMRQYNSENFALLEDVQAKVLEIPYKGKDLSMIVLLPNEIDGLQKLEEKLTAEKLMEWT
SLQNMRETCVDLHLPRFKMEESYDLKDTLRTMGMVNIENGDADLSGMTWSHGLSVSKVLHKAFVEVTEEGVEAAAATAVVVVELSSPS
TNEEFCCNHPFLFFIRQNKTNSILFYGRFSSP
NP_004146.1>SerpinB9 SEQ ID NO: 462
METLSNASGTFAIRLLKILCQDNPSHNVFCSPVSISSALAMVLLGAKGNTATQMAQALSLNTEEDIHRAFQSLLTEVNKAGTQYLLRTANR
LFGEKTCQFLSTEKESCLQFYHAELKELSFIRAAEESRKHINTWVSKKTEGKIEELLPGSSIDAETRLVLVNAIYFKGKWNEPFDETYTREM
PFKINQEEQRPVQMMYQEATFKLAHVGEVRAQLLELPYARKELSLLVLLPDDGVELSTVEKSLTFEKLTAWTKPDCMKSTEVEVLLPKFK
LQEDYDMESVLRHLGIVDAFQQGKADLSAMSAERDLCLSKFVHKSFVEVNEEGTEAAAASSCFVVAECCMESGPRECADHPFLFFIRHNR
ANSILFCGRFSSP
NP_005015.1 >SerpinB10 SEQ ID NO: 463
MDSLATSINQFALELSKKLAESAQGKNIFFSSWSISTSLTIVYLGAKGTTAAQMAQVLQFNRDQGVKCDPESEKKRKMEENLSNSEEIHSD
FQTLISEILKPNDDYLLKTANAIYGEKTYAFHNKYLEDMKTYFGAEPQPVNEVEASDQIRKDINSWVERQTEGKIQNLLPDDSVDSTTRMI
LVNALYFKGIWEHQFLVQNTTEKPFRINETTSKPVQMMFMKKKLHIFHIEKPKAVGLQLYYKSRDLSLLILLPEDINGLEQLEKAITYEKL
NEWTSADMMELYEVQLHLPKFKLEDSYDLKSTLSSMGMSDAFSQSKADFSGMSSARNLFLSNVFHKAFVEINEQGTEAAAGSGSEIDIRIR
VPSIEFNANHPFLFFIRHNKTNTILFYGRLCSP
BORFE2 SEQ ID NO: 464
MVTRDVLLAIETHLNQNEKTFVMYELLDPYIPKECEDFLPTLENLHSKRKIIYPILIELMYILQRFDLLRSIFLLDHRFVKDQITSSHWNYISP
YKQLIFSIGQNIDDEDLISIKFISMNYIGKSPSKIKNYLDWVRALEKVAMVGPDNLDLFETLFKQIHRMDIVKMIKNYRTRETLQITL
CrmA SEQ ID NO: 465
MDIFREIASSMKGENVFISPPSISSVLTILYYGANGSTAEQLSKYVEKEADKNKDDISFKSMNKVYGRYSAVFKDSFLRKIGDNFQTVDFTDC
RTVDAINKCVDIFTEGKINPLLDEPLSPDTCLLAISAVYFKAKWLMPFEKEFTSDYPFYVSPTEMVDVSMMSMYGEAFNHASVKESFGNFS
IIELPYVGDTSMVVILPDNIDGLESIEQNLTDTNFKKWCDSMDAMFIDVHIPKFKVTGSYNLVDALVKLGLTEVFGSTGDYSNMCNSDVSV
DAMIHKTYIDVNEEYTEAAAATCALVADCASTVTNEFCADHPFIYVIRHVDGKILFVGRYCSPTTNMHQKRTAMFQDPQERPRKLPQLCT
ELQTTIHDIILECVYCKQQLLRREVYDFAFRDLCIVYRDGNPYAVCDKCLKFYSKISEYRHYCYSLYGTTLEQQYNKPLCDLLIRCINCQKPL
CPEEKQRHLDKKQRFHNIRGRWTGRCMSCCRSSRTRRETQL
314.7kDA1 SEQ ID NO: 466
MSNGAADRARLRHLDHCRQPHCFARDICVFTYFELPEEHPQGPAHGVRITVEKGIDTHLIKFFTKRPLLVEKDQGNTILTLYCICPVPGLH
EDFCCHLCAEFNHL
E314.7kDA2 SEQ ID NO: 467
MKISAVICVLNLIICSGAVPPEEEPNCHPHLSNIKINLSIPHITLRCSFFSTHLTWTFNGKHVTNTDIKFKLHKENITLFQPINLGYYRCSAPP
CTQAFFVAPVIDKRPAPTTAAVTEHITEAVSPSKGTEEIVYFSNFTNHLVLNCSCSNSLISWFANSSLCKTFYQGKLLYSAKLTLCNQSTPSH
LTLLPPEVAGRYFCIGAARTSPCQQHWNLTYCPPPVSPFVINTEYLDYNPLLAYGGLAALILFLISNLFLVQHLYSY
E314.7kDA 3 SEQ ID NO: 468
MLSIFLLFLFSLPSGLYAQTAERPLKVVVEAGHNVTLPHLSGSHQTGHVTWLVETSDYGSASPDNFIFSGQKLCQFTDRTMVWPYYNLHF
NCENYDLNLFWLKVENSAIYNVKNTVNASETNIYYDLRVVQIFPPKCIITSKYLTNDYCHITINCTNSDYPNKVVFNNVSRWYYGYGKGSP
TLPNYFITNFNVSGITKSFNHTYPFNELCDYPTSQSQHSLTHTVSTVIFLGIIGFSILIIIAAFIYLCWHRKSLCVSKTEPLMPIPY
E314.7kDA4 SEQ ID NO: 469
MKTALVLFFMLIPVWASSCQLHKPWNFLDCYTKETNYIGWVYGIMSGLVFVSSVVSLQLYARLNFSWNKYTDDLPEYPNPQDDLPLNIVF
PEPPRPPSVVSYFKFTGEDD
E314.7kDA5 SEQ ID NO: 470
MIEPDLEIDGRITEQRLLTDRARRRQQDQKNKELIDLQTVHQCKKGLFCLVKQATLRYESLPGKEHQLCYTLPTQRQTFTAMVGSVPIKVS
QQAGEQEGSIRCLCDNPECLYTLIKTLCGLRNLLPMN
K13 SEQ ID NO: 471
MATYEVLCEVARKLGTDDREVVLELLNVFIPQPTLAQLIGALRALKEEGRLTFPLLAECLFRAGRRDLLRDLLHLDPRFLERHLAGTMSYF
SPYQLTVLHVDGELCARDIRSLIFLSKDTIGSRSTPQTFLHWVYCMENLDLLGPTDVDALMSMLRSLSRVDLQRQVQTLMGLHLSGPSHS
QHYRHTP
MC159 SEQ ID NO: 472
MSDSKEVPSLPFLRHLLEELDSHEDSLLLFLCHDAAPGCTTVTQALCSLSQQRKLTLAALVEMLYVLQRMDLLKSRFGLSKEGAEQLLGTS
FLTRYRKLMVCVGEELDSSELRALRLFACNLNPSLSTALSESSRFVELVLALENVGLVSPSSVSVLADMLRTLRRLDLCQQLVEYEQQEQAR
YRYCYAASPSLPVRTLRRGHGASEHEQLCMPVQESSDSPELLRTPVQESSSDSPEQTT
p35 SEQ ID NO: 473
MCVIFPVEIDVSQTIIRDCQVDKQTRELVYINKIMNTQLTKPVLMMFNISGPIRSVTRKNNNLRDRIKSKVDEQFDQLERDYSDQMDGFHD
SIKYFKDEHYSVSCQNGSVLKSKFAKILKSHDYTDKKSIEAYEKYCLPKLVDERNDYYVAVCVLKPGFENGSNQVLSFEYNPIGNKVIVPFA
HEINDTGLYEYDVVAYVDSVQFDGEQFEEFVQSLILPSSFKNSEKVLYYNEASKNKSMIYKALEFTTESSWGKSEKYNWKIFCNGFIYDKKS
KVLYVKLHNVTSALNKNVILNTIK
Serp2 SEQ ID NO: 474
MELFKHFLQSTASDVFVSPVSISAVLAVLLEGAKGRTAAQLRLALEPRYSHLDKVTVASRVYGDWRLDIKPKFMQAVRDRFELVNFNHSP
EKIKDDINRWVAARTNNKILNAVNSISPDTKLLIVAAIYFEVAWRNQFVPDFTIEGEFWVTKDVSKTVRMMTLSDDFRFVDVRNEGIKMI
ELPYEYGYSMLVIIPDDLEQVERHLSLMKVISWLKMSTLRYVHLSFPKFKMETSYTLNEALATSGVTDIFAHPNFEDMTDDKNVAVSDIF
HKAYIEVTEFGTTAASCTYGCVTDFGGTMDPVVLKVNKPFIFIIKHDDTFSLLFLGRVTSPNY
UL39.1 SEQ ID NO: 475
MASRPAASSPVEARAPVGGQEAGGPSAATQGEAAGAPLAHGHHVYCQRVNGVMVLSDKTPGSASYRISDNNFVQCGSNCTMIIDGDVVR
GRPQDPGAAASPAPFVAVTNIGAGSDGGTAVVAFGGTPRRSAGTSTGTQTADVPTEALGGPPPPPRFTLGGGCCSCRDTRRRSAVFGGEG
DPVGPAEFVSDDRSSDSDSDDSEDTDSETLSHASSDVSGGATYDDALDSDSSSDDSLQIDGPVCRPWSNDTAPLDVCPGTPGPGADAGGPS
AVDPHAPTPEAGAGLAADPAVARDDAEGLSDPRPRLGTGTAYPVPLELTPENAEAVARFLGDAVNREPALMLEYFCRCAREETKRVPPR
TFGSPPRLTEDDFGLLNYALVEMQRLCLDVPPVPPNAYMPYYLREYVTRLVNGFKPLVSRSARLYRILGVLVHLRIRTREASFEEWLRSKE
VALDFGLTERLREHEAQLVILAQALDHYDCLIHSTPHTLVERGLQSALKYEEFYLKRFGGHYMESVFQMYTRIAGFLACRATRGMRHIALG
REGSWWEMFKFFFHRLYDHQIVPSTPAMLNLGTRNYYTSSCYLVNPQATTNKATLRAITSNVSAILARNGGIGLCVQAFNDSGPGTASVM
PALKVLDSLVAAHNKESARPTGACVYLEPWHTDVRAVLRMKGVLAGEEAQRCDNIFSALWMPDLFFKRLIRHLDGEKNVTWTLFDRDT
SMSLADFHGEEFEKLYQHLEVMGFGEQIPIQELAYGIVRSAATTGSPFVMFKDAVNRHYIYDTQGAAIAGSNLCTEIVHPASKRSSGVCNLG
SVNLARCVSRQTFDFGRLRDAVQACVLMVNIMIDSTLQPTPQCTRGNDNLRSMGIGMQGLHTACLKLGLDLESAEFQDLNKHIAEVMLLS
AMKTSNALCVRGARPFNHFKRSMYRAGRFHWERFPDARPRYEGEWEMLRQSMMKHGLRNSQFVALMPTAASAQISDVSEGFAPLFTN
LFSKVTRDGETLRPNTLLLKELERTFSGKRLLEVMDSLDAKQWSVAQALPCLEPTHPLRRFKTAFDYDQKLLIDLCADRAPYVDHSQSMT
LYVTEKADGTLPASTLVRLLVHAYKRGLKTGMYYCKVRKATNSGVFGGDDNIVCMSCAL
vICA SEQ ID NO: 476
MDDLRDTLMAYGCIAIRAGDFNGLNDFLEQECGTRLHVAWPERCFIQLRSRSALGPFVGKMGTVCSQGAYVCCQEYLHPFGFVEGPGFM
RYQLIVLIGQRGGIYCYDDLRDCIYELAPTMKDFLRHGFRHCDHFHTMRDYQRPMVQYDDYWNAVMLYRGDVESLSAEVTKRGYASYSI
DDPFDECPDTHFAFWTHNTEVMKFKETSFSVVRAGGSIQTMELMIRTVPRITCYHQLLGALGHEVPERKEFLVRQYVLVDTFGVVYGYDP
AMDAVYRLAEDVVMFTCVMGKKGHRNHRFSGRREAIVRLEKTPTCQHPKKTPDPMIMFDEDDDDELSLPRNVMTHEEAESRLYDAITE
NLMHCVKLVTTDSPLATHLWPQELQALCDSPALSLCTDDVEGVRQKLRARTGSLHHFELSYRFHDEDPETYMGFLWDIPSCDRCVRRRR
FKVCDVGRRHIIPGAANGMPPLTPPHAYMNN
UL39.2 SEQ ID NO: 477
MANRPAASALAGARSPSERQEPREPEVAPPGGDHVFCRKVSGVMVLSSDPPGPAAYRISDSSFVQCGSNCSMIIDGDVARGHLRDLEGATS
TGAFVAISNVAAGGDGRTAVVALGGTSGPSATTSVGTQTSGEFLHGNPRTPEPQGPQAVPPPPPPPFPWGHECCARRDARGGAEKDVGA
AESWSDGPSSDSETEDSDSSDEDTGSETLSRSSSIWAAGATDDDDSDSDSRSDDSVQPDVVVRRRWSDGPAPVAFPKPRRPGDSPGNPGL
GAGTGPGSATDPRASADSDSAAHAAAPQADVAPVLDSQPTVGTDPGYPVPLELTPENAEAVARFLGDAVDREPALMLEYFCRCAREESK
RVPPRTFGSAPRLTEDDFGLLNYALAEMRRLCLDLPPVPPNAYTPYHLREYATRLVNGFKPLVRRSARLYRILGVLVHLRIRTREASFEEW
MRSKEVDLDFGLTERLREHEAQLMILAQALNPYDCLIHSTPNTLVERGLQSALKYEEFYLKRFGGHYMESVFQMYTRIAGFLACRATRGM
RHIALGRQGSWWEMFKFFFHRLYDHQIVPSTPAMLNLGTRNYYTSSCYLVNPQATTNQATLRAITGNVSAILARNGGIGLCMQAFNDASP
GTASIMPALKVLDSLVAAHNKQSTRPTGACVYLEPWHSDVRAVLRMKGVLAGEEAQRCDNIFSALWMPDLFFKRLIRHLDGEKNVTWS
LFDRDTSMSLADFHGEEFEKLYEHLEAMGFGETIPIQDLAYAIVRSAATTGSPFIMFKDAVNRHYIYDTQGAAIAGSNLCTEIVHPASKRSS
GVCNLGSVNLARCVSRQTFDFGRLRDAVQACVLMVNIMIDSTLQPTPQCTRGNDNLRSMGIGMQGLHTACLKMGLDLESAEFRDLNTHI
AEVMLLAAMKTSNALCVRGARPFSHFKRSMYRAGRFHWERFSNASPRYEGEWEMLRQSMMKHGLRNSQFIALMPTAASAQISDVSEGF
APLFTNLFSKVTRDGETLRPNTLLLKELERTFGGKRLLDAMDGLEAKQWSVAQALPCLDPAHPLRRFKTAFDYDQELLIDLCADRAPYV
DHSQSMTLYVTEKADGTLPASTLVRLLVHAYKRGLKTGMYYCKVRKATNSGVFAGDDNIVCTSCAL
vIRA SEQ ID NO: 478
MDRQPKVYSDPDNGFFFLDVPMPDDGQGGQQTATTAAGGAFGVGGGHSVPYVRIMNGVSGIQIGNHNAMSIASCWSPSYTDRRRRSYPK
TATNAAADRVAAAVSAANAAVNAAAAAAAAGGGGGANLLAAAVTCANQRGCCGGNGGHSLPPTRAPKTNATAAAAPAVAVASNAKSD
NNHANAASGAGSAAATPAATTSAAAAVENRRPSPSPSTASTAPCDEGSSPRHHRPSHVSVGTQATPSTPIPIPAPRCSTGQQQQQPQAKK
LKPAKADPLLYAATMPPPASVTTAAAAAVAPESESSPAASAPPAAAAMATGGDDEDQSSFSFVSDDVLGEFEDLRIAGLPVRDEMRPPTP
TMTVIPVSRPFRAGRDSGRDALFDDAVESVRCYCHGILGNSRFCALVNEKCSEPAKERMARIRRYAADVTRCGPLALYTAIVSSANRLIQT
DPSCDLDLAECYVETASKRNAVPLSAFYRDCDRLRDAVAAFFKTYGMVVDAMAQRITERVGPALGRGLYSTVVMMDRCGNSFQGREETP
ISVFARVAAALAVECEVDGGVSYKILSSKPVDAAQAFDAFLSALCSFAIIPSPRVLAYAGFGGSNPIFDAVSYRAQFYSAESTINGTLHDICDM
VTNGLSVSVSAADLGGDIVASLHILGQQCKALRPYARFKTVLRIYFDIWSVDALKIFSFILDVGREYEGLMAFAVNTPRIFWDRYLDSSGDK
MWLMFARREAAALCGLDLKSFRNVYEKMERDGRSAITVSPVVWAVCQLDACVARGNTAVVFPHNVKSMIPENIGRPAVCGPGVSVVSGG
FVGCTPIHELCINLENCVLEGAAVESSVDVVLGLGCRFSFKALESLVRDAVVLGNLLIDMTVRTNAYGAGKLLTLYRDLHIGVVGFHAVMN
RLGQKFADMESYDLNQRIAEFIYYTAVRASVDLCMAGADPFPKFPKSLYAAGRFYPDLFDDDERGPRRMTKEFLEKLREDVVKHGIRNAS
FITGCSADEAANLAGTTPGFWPRRDNVFLEQTPLMMTPTKDQMLDECVRSVKIEPHRLHEEDLSCLGENRPVELPVLNSRLRQISKESAT
VAVRRGRSAPFYDDSDDEDEVACSETGWTVSTDAVIKMCVDRQPFVDHAQSLPVAIGFGGSSVELARHLRRGNALGLSVGVYKCSMPPSV
NYR

### Example 6

### Plant Viral Nucleic Acids

Tobacco mosaic virus (genomic DNA, Accession Number: NC_001367.1) (SEQ ID
NO: 430):
GTATTTTTACAACAATTACCAACAACAACAAACAACAAACAACATTACAATTACTATTTACAATTACAAT
GGCATACACACAGACAGCTACCACATCAGCTTTGCTGGACACTGTCCGAGGAAACAACTCCTTGGTCAAT
GATCTAGCAAAGCGTCGTCTTTACGACACAGCGGTTGAAGAGTTTAACGCTCGTGACCGCAGGCCCAAGG
TGAACTTTTCAAAAGTAATAAGCGAGGAGCAGACGCTTATTGCTACCCGGGCGTATCCAGAATTCCAAAT
TACATTTTATAACACGCAAAATGCCGTGCATTCGCTTGCAGGTGGATTGCGATCTTTAGAACTGGAATAT
CTGATGATGCAAATTCCCTACGGATCATTGACTTATGACATAGGCGGGAATTTTGCATCGCATCTGTTCA
AGGGACGAGCATATGTACACTGCTGCATGCCCAACCTGGACGTTCGAGACATCATGCGGCACGAAGGCCA
GAAAGACAGTATTGAACTATACCTTTCTAGGCTAGAGAGAGGGGGGAAAACAGTCCCCAACTTCCAAAAG
GAAGCATTTGACAGATACGCAGAAATTCCTGAAGACGCTGTCTGTCACAATACTTTCCAGACAATGCGAC
ATCAGCCGATGCAGCAATCAGGCAGAGTGTATGCCATTGCGCTACACAGCATATATGACATACCAGCCGA
TGAGTTCGGGGCGGCACTCTTGAGGAAAAATGTCCATACGTGCTATGCCGCTTTCCACTTCTCTGAGAAC
CTGCTTCTTGAAGATTCATACGTCAATTTGGACGAAATCAACGCGTGTTTTTCGCGCGATGGAGACAAGT
TGACCTTTTCTTTTGCATCAGAGAGTACTCTTAATTATTGTCATAGTTATTCTAATATTCTTAAGTATGT
GTGCAAAACTTACTTCCCGGCCTCTAATAGAGAGGTTTACATGAAGGAGTTTTTAGTCACCAGAGTTAAT
ACCTGGTTTTGTAAGTTTTCTAGAATAGATACTTTTCTTTTGTACAAAGGTGTGGCCCATAAAAGTGTAG
ATAGTGAGCAGTTTTATACTGCAATGGAAGACGCATGGCATTACAAAAAGACTCTTGCAATGTGCAACAG
CGAGAGAATCCTCCTTGAGGATTCATCATCAGTCAATTACTGGTTTCCCAAAATGAGGGATATGGTCATC
GTACCATTATTCGACATTTCTTTGGAGACTAGTAAGAGGACGCGCAAGGAAGTCTTAGTGTCCAAGGATT
TCGTGTTTACAGTGCTTAACCACATTCGAACATACCAGGCGAAAGCTCTTACATACGCAAATGTTTTGTC
CTTTGTCGAATCGATTCGATCGAGGGTAATCATTAACGGTGTGACAGCGAGGTCCGAATGGGATGTGGAC
AAATCTTTGTTACAATCCTTGTCCATGACGTTTTACCTGCATACTAAGCTTGCCGTTCTAAAGGATGACT
TACTGATTAGCAAGTTTAGTCTCGGTTCGAAAACGGTGTGCCAGCATGTGTGGGATGAGATTTCGCTGGC
GTTTGGGAACGCATTTCCCTCCGTGAAAGAGAGGCTCTTGAACAGGAAACTTATCAGAGTGGCAGGCGAC
GCATTAGAGATCAGGGTGCCTGATCTATATGTGACCTTCCACGACAGATTAGTGACTGAGTACAAGGCCT
CTGTGGACATGCCTGCGCTTGACATTAGGAAGAAGATGGAAGAAACGGAAGTGATGTACAATGCACTTTC
AGAGTTATCGGTGTTAAGGGAGTCTGACAAATTCGATGTTGATGTTTTTTCCCAGATGTGCCAATCTTTG
GAAGTTGACCCAATGACGGCAGCGAAGGTTATAGTCGCGGTCATGAGCAATGAGAGCGGTCTGACTCTCA
CATTTGAACGACCTACTGAGGCGAATGTTGCGCTAGCTTTACAGGATCAAGAGAAGGCTTCAGAAGGTGC
TTTGGTAGTTACCTCAAGAGAAGTTGAAGAACCGTCCATGAAGGGTTCGATGGCCAGAGGAGAGTTACAA
TTAGCTGGTCTTGCTGGAGATCATCCGGAGTCGTCCTATTCTAAGAACGAGGAGATAGAGTCTTTAGAGC
AGTTTCATATGGCAACGGCAGATTCGTTAATTCGTAAGCAGATGAGCTCGATTGTGTACACGGGTCCGAT
TAAAGTTCAGCAAATGAAAAACTTTATCGATAGCCTGGTAGCATCACTATCTGCTGCGGTGTCGAATCTC
GTCAAGATCCTCAAAGATACAGCTGCTATTGACCTTGAAACCCGTCAAAAGTTTGGAGTCTTGGATGTTG
CATCTAGGAAGTGGTTAATCAAACCAACGGCCAAGAGTCATGCATGGGGTGTTGTTGAAACCCACGCGAG
GAAGTATCATGTGGCGCTTTTGGAATATGATGAGCAGGGTGTGGTGACATGCGATGATTGGAGAAGAGTA
GCTGTCAGCTCTGAGTCTGTTGTTTATTCCGACATGGCGAAACTCAGAACTCTGCGCAGACTGCTTCGAA
ACGGAGAACCGCATGTCAGTAGCGCAAAGGTTGTTCTTGTGGACGGAGTTCCGGGCTGTGGGAAAACCAA
AGAAATTCTTTCCAGGGTTAATTTTGATGAAGATCTAATTTTAGTACCTGGGAAGCAAGCCGCGGAAATG
ATCAGAAGACGTGCGAATTCCTCAGGGATTATTGTGGCCACGAAGGACAACGTTAAAACCGTTGATTCTT
TCATGATGAATTTTGGGAAAAGCACACGCTGTCAGTTCAAGAGGTTATTCATTGATGAAGGGTTGATGTT
GCATACTGGTTGTGTTAATTTTCTTGTGGCGATGTCATTGTGCGAAATTGCATATGTTTACGGAGACACA
CAGCAGATTCCATACATCAATAGAGTTTCAGGATTCCCGTACCCCGCCCATTTTGCCAAATTGGAAGTTG
ACGAGGTGGAGACACGCAGAACTACTCTCCGTTGTCCAGCCGATGTCACACATTATCTGAACAGGAGATA
TGAGGGCTTTGTCATGAGCACTTCTTCGGTTAAAAAGTCTGTTTCGCAGGAGATGGTCGGCGGAGCCGCC
GTGATCAATCCGATCTCAAAACCCTTGCATGGCAAGATCCTGACTTTTACCCAATCGGATAAAGAAGCTC
TGCTTTCAAGAGGGTATTCAGATGTTCACACTGTGCATGAAGTGCAAGGCGAGACATACTCTGATGTTTC
ACTAGTTAGGTTAACCCCTACACCAGTCTCCATCATTGCAGGAGACAGCCCACATGTTTTGGTCGCATTG
TCAAGGCACACCTGTTCGCTCAAGTACTACACTGTTGTTATGGATCCTTTAGTTAGTATCATTAGAGATC
TAGAGAAACTTAGCTCGTACTTGTTAGATATGTATAAGGTCGATGCAGGAACACAATAGCAATTACAGAT
TGACTCGGTGTTCAAAGGTTCCAATCTTTTTGTTGCAGCGCCAAAGACTGGTGATATTTCTGATATGCAG
TTTTACTATGATAAGTGTCTCCCAGGCAACAGCACCATGATGAATAATTTTGATGCTGTTACCATGAGGT
TGACTGACATTTCATTGAATGTCAAAGATTGCATATTGGATATGTCTAAGTCTGTTGCTGCGCCTAAGGA
TCAAATCAAACCACTAATACCTATGGTACGAACGGCGGCAGAAATGCCACGCCAGACTGGACTATTGGAA
AATTTAGTGGCGATGATTAAAAGGAACTTTAACGCACCCGAGTTGTCTGGCATCATTGATATTGAAAATA
CTGCATCTTTAGTTGTAGATAAGTTTTTTGATAGTTATTTGCTTAAAGAAAAAAGAAAACCAAATAAAAA
TGTTTCTTTGTTCAGTAGAGAGTCTCTCAATAGATGGTTAGAAAAGCAGGAACAGGTAACAATAGGCCAG
CTCGCAGATTTTGATTTTGTAGATTTGCCAGCAGTTGATCAGTACAGACACATGATTAAAGCACAACCCA
AGCAAAAATTGGACACTTCAATCCAAACGGAGTACCCGGCTTTGCAGACGATTGTGTACCATTCAAAAAA
GATCAATGCAATATTTGGCCCGTTGTTTAGTGAGCTTACTAGGCAATTACTGGACAGTGTTGATTCGAGC
AGATTTTTGTTTTTCACAAGAAAGACACCAGCGCAGATTGAGGATTTCTTCGGAGATCTCGACAGTCATG
TGCCGATGGATGTCTTGGAGCTGGATATATCAAAATACGACAAATCTCAGAATGAATTCCACTGTGCAGT
AGAATACGAGATCTGGCGAAGATTGGGTTTTGAAGACTTCTTGGGAGAAGTTTGGAAACAAGGGCATAGA
AAGACCACCCTCAAGGATTATACCGCAGGTATAAAAACTTGCATCTGGTATCAAAGAAAGAGCGGGGACG
TCACGACGTTCATTGGAAACACTGTGATCATTGCTGCATGTTTGGCCTCGATGCTTCCGATGGAGAAAAT
AATCAAAGGAGCCTTTTGCGGTGACGATAGTCTGCTGTACTTTCCAAAGGGTTGTGAGTTTCCGGATGTG
CAACACTCCGCGAATCTTATGTGGAATTTTGAAGCAAAACTGTTTAAAAAACAGTATGGATACTTTTGCG
GAAGATATGTAATACATCACGACAGAGGATGCATTGTGTATTACGATCCCCTAAAGTTGATCTCGAAACT
TGGTGCTAAACACATCAAGGATTGGGAACACTTGGAGGAGTTCAGAAGGTCTCTTTGTGATGTTGCTGTT
TCGTTGAACAATTGTGCGTATTACACACAGTTGGACGACGCTGTATGGGAGGTTCATAAGACCGCCCCTC
CAGGTTCGTTTGTTTATAAAAGTCTGGTGAAGTATTTGTCTGATAAAGTTCTTTTTAGAAGTTTGTTTAT
AGATGGCTCTAGTTGTTAAAGGAAAAGTGAATATCAATGAGTTTATCGACCTGACAAAAATGGAGAAGAT
CTTACCGTCGATGTTTACCCCTGTAAAGAGTGTTATGTGTTCCAAAGTTGATAAAATAATGGTTCATGAG
AATGAGTCATTGTCAGAGGTGAACCTTCTTAAAGGAGTTAAGCTTATTGATAGTGGATACGTCTGTTTAG
CCGGTTTGGTCGTCACGGGCGAGTGGAACTTGCCTGACAATTGCAGAGGAGGTGTGAGCGTGTGTCTGGT
GGACAAAAGGATGGAAAGAGCCGACGAGGCCACTCTCGGATCTTACTACACAGCAGCTGCAAAGAAAAGA
TTTCAGTTCAAGGTCGTTCCCAATTATGCTATAACCACCCAGGACGCGATGAAAAACGTCTGGCAAGTTT
TAGTTAATATTAGAAATGTGAAGATGTCAGCGGGTTTCTGTCCGCTTTCTCTGGAGTTTGTGTCGGTGTG
TATTGTTTATAGAAATAATATAAAATTAGGTTTGAGAGAGAAGATTACAAACGTGAGAGACGGAGGGCCC
ATGGAACTTACAGAAGAAGTCGTTGATGAGTTCATGGAAGATGTCCCTATGTCGATCAGGCTTGCAAAGT
TTCGATCTCGAACCGGAAAAAAGAGTGATGTCCGCAAAGGGAAAAATAGTAGTAATGATCGGTCAGTGCC
GAACAAGAACTATAGAAATGTTAAGGATTTTGGAGGAATGAGTTTTAAAAAGAATAATTTAATCGATGAT
GATTCGGAGGCTACTGTCGCCGAATCGGATTCGTTTTAAATATGTCTTACAGTATCACTACTCCATCTCA
GTTCGTGTTCTTGTCATCAGCGTGGGCCGACCCAATAGAGTTAATTAATTTATGTACTAATGCCTTAGGA
AATCAGTTTCAAACACAACAAGCTCGAACTGTCGTTCAAAGACAATTCAGTGAGGTGTGGAAACCTTCAC
CACAAGTAACTGTTAGGTTCCCTGACAGTGACTTTAAGGTGTACAGGTACAATGCGGTATTAGACCCGCT
AGTCACAGCACTGTTAGGTGCATTCGACACTAGAAATAGAATAATAGAAGTTGAAAATCAGGCGAACCCC
ACGACTGCCGAAACGTTAGATGCTACTCGTAGAGTAGACGACGCAACGGTGGCCATAAGGAGCGCGATAA
ATAATTTAATAGTAGAATTGATCAGAGGAACCGGATCTTATAATCGGAGCTCTTTCGAGAGCTCTTCTGG
TTTGGTTTGGACCTCTGGTCCTGCAACTTGAGGTAGTCAAGATGCATAATAAATAACGGATTGTGTCCGT
AATCACACGTGGTGCGTACGATAACGCATAGTGTTTTTCCCTCCACTTAAATCGAAGGGTTGTGTCTTGG
ATCGCGCGGGTCAAATGTATATGGTTCATATACATCCGCAGGCACGTAATAAAGCGAGGGGTTCGAATCC
CCCCGTTACCCCCGGTAGGGGCCCA
Cauliflower Mosaic Virus Sequence (genomic DNA, Accession Number:
NC_001497.1) (SEQ ID NO: 431):
GGTATCAGAGCCATGAATCGGTTTAAGACCAAAACTCAAGAGGGTAAAACCTCACCAAAATACGAAAGAG
TTCTTAACTCTAAAAATAAAAGATCTTTCAAGATCAAACATAGTTCCCTCACACCGGTGACCGACAGGAT
TACCACCGTAAGGTTTCAGAACAACATCGAAAGCGTTTACGCCAACTTCGACTCTCAACTCAAGTCGTCG
TACGATGGTAGATCTAAAAAGATCAAGACTCTAAGCCTTAAAAATCTTAGATGTTACGAAGCCTTCCTCA
GGAAGTACCTTCTGGAACAATAAATCTCTCTGAGAATAGTACTCTATTGAGTATCCACAGGAAAAATAAC
CTTCTGTGTTGAGATGGATTTGTATCCAGAAGAAAATACCCAAAGCGAGCAATCGCAGAATTCTGAAAAT
AATATGCAAATATTTAAATCAGAAAATTCGGATGGATTCTCCTCCGATCTAATGATCTCAAACGATCAAT
TAAAAAATATCTCTAAAACCCAATTAACCTTGGAGAAAGAAAAGATATTTAAAATGCCTAACGTTTTATC
TCAAGTTATGAAAAAAGCGTTTAGCAGGAAAAACGAGATTCTCTACTGCGTCTCGACAAAAGAATTATCA
GTGGACATTCACGATGCCACAGGTAAGGTATATCTTCCCTTAATCACTAAGGAAGAGATAAATAAAAGAC
TTTCCAGCTTAAAACCTGAAGTCAGAAAGACCATGTCCATGGTTCATCTTGGAGCGGTCAAAATATTGCT
TAAAGCTCAATTTCGAAATGGGATTGATACCCCAATCAAAATTGCTTTAATCGATGATAGAATCAATTCT
AGAAGAGATTGTCTTCTTGGTGCAGCCAAAGGTAATCTAGCATACGGTAAGTTTATGTTTACTGTATACC
CTAAGTTTGGAATAAGCCTTAACACCCAAAGACTTAACCAAACCCTAAGCCTTATTCATGATTTTGAAAA
TAAAAATCTTATGAATAAAGGTGATAAAGTTATGACCATAACCTATGTCGTAGGATATGCATTAACTAAT
AGTCATCATAGCATAGATTATCAATCAAATGCTACAATTGAACTAGAAGACGTATTTCAAGAAATTGGAA
ATGTCCAGCAATCTGAGTTCTGTACAATACAGAATGATGAATGCAATTGGGCCATTGATATAGCCCAAAA
CAAAGCCTTATTAGGAGCTAAAACCAAGACTCAAATTGGTAATAACCTTCAAATAGGTAACAGTGCTTCA
TCCTCTAATACTGAAAATGAATTAGCTAGGGTAAGCCAGAACATAGATCTTTTAAAGAATAAATTAAAAG
AAATCTGTGGAGAATAATATGAGCATTACGGGACAACCGCATGTTTATAAAAAAGATACTATTATTAGAC
TAAAACCATTGTCTCTTAATAGTAATAATAGAAGTTATGTTTTTAGTTCCTCAAAAGGGAACATTCAAAA
TATAATTAATCATCTTAACAACCTCAATGAGATTGTAGGAAGAAGCTTACTCGGAATATGGAAGATCAAC
TCATACTTCGGATTAAGCAAAGACCCTTCGGAGTCCAAATCAAAAAACCCGTCAGTTTTTAATACTGCAA
AAACCATTTTTAAGAGTGGGGGGGTTGATTACTCGAGCCAACTAAAGGAAATAAAATCCCTTTTAGAAGC
TCAAAACACTAGAATAAAAAGTCTAGAAAAAGCAATTCAATCCTTAGAAAATAAGATTGAACCAGAGCCC
TTAACTAAAGAGGAAGTTAAAGAGCTAAAAGAATCGATTAACTCGATCAAAGAAGGATTAAAGAATATTA
TTGGCTAAAATGGCTAATCTTAATCAGATCCAAAAAGAAGTCTCTGAAATCCTCAGTGACCAAAAATCCA
TGAAAGCGGATATAAAAGCTATCTTAGAATTATTAGGATCCCAAAATCCTATTAAAGAAAGCTTAGAAAC
CGTTGCAGCAAAAATCGTTAATGACTTAACCAAGCTCATCAATGATTGTCCTTGTAACAAAGAGATATTA
GAAGCCTTAGGTACCCAACCTAAAGAGCAACTAATAGAACAACCTAAAGAAAAAGGTAAAGGCCTTAACT
TAGGAAAATACTCTTACCCCAATTACGGAGTAGGAAATGAAGAATTAGGATCCTCTGGAAACCCTAAAGC
TTTAACCTGGCCCTTCAAAGCTCCAGCAGGATGGCCGAATCAATTTTAGACAGAACCATTAATAGGTTTT
GGTATAATCTGGGAGAAGATTGTCTCTCAGAAAGTCAATTCGATCTTATGATAAGATTGATGGAAGAGTC
CCTTGACGGGGACCAAATTATTGATCTAACCTCTCTACCTAGTGATAATTTGCAGGTTGAACAGGTTATG
ACAACTACCGAAGACTCAATCTCGGAAGAAGAATCAGAATTCCTTCTAGCAATAGGAGAAACATCTGAAG
AAGAAAGCGATTCAGGAGAAGAACCTGAATTCGAGCAAGTTCGAATGGATCGAACAGGAGGAACGGAGAT
TCCAAAAGAAGAAGATGGTGAAGGACCATCTAGATACAATGAGAGAAAGAGAAAGACCCCGGAGGACCGG
TACTTTCCAACTCAACCAAAGACCATTCCAGGACAAAAGCAAACGTCTATGGGAATGCTCAACATTGACT
GCCAAACCAATCGAAGAACTCTAATCGACGACTGGGCAGCAGAAATCGGATTGATAGTCAAGACCAATAG
AGAAGACTATCTCGATCCAGAAACAATTCTACTCTTGATGGAACACAAAACATCAGGAATAGCCAAGGAG
TTAATCCGAAATACAAGATGGAACCGCACTACCGGAGACATCATAGAACAGGTGATCGATGCGATGTACA
CCATGTTCTTAGGACTAAACTACTCCGACAACAAAGTTGCTGAGAAGATTGACGAGCAAGAGAAGGCCAA
GATCAGAATGACCAAGCTCCAGCTCTGCGACATCTGCTACCTTGAGGAATTTACATGTGATTATGAAAAG
AACATGTATAAGACAGAACTGGCGGATTTCCCAGGATATATCAACCAGTACCTGTCAAAAATCCCCATCA
TTGGAGAAAAAGCGTTAACACGCTTTAGGCATGAAGCTAACGGAACCAGCATCTACAGTTTAGGTTTCGC
GGCAAAGATAGTCAAAGAAGAACTATCTAAAATCTGCGACTTATCCAAGAAGCAGAAGAAGTTGAAGAAA
TTCAACAAGAAGTGTTGTAGCATCGGAGAAGCTTCAACAGAATATGGATGCAAGAAGACATCCACAAAGA
AGTATCACAAGAAGCGATACAAGAAAAAATATAAGGCTTACAAACCTTATAAGAAGAAAAAGAAGTTCCG
ATCAGGAAAATACTTCAAGCCCAAAGAAAAGAAGGGCTCAAAGCAAAAGTATTGCCCAAAAGGCAAGAAA
GATTGCAGATGTTGGATCTGCAACATTGAAGGCCATTACGCCAACGAATGTCCTAATCGACAAAGCTCGG
AGAAGGCTCACATCCTTCAACAAGCAGAAAAATTGGGTCTCCAGCCCATTGAAGAACCCTATGAAGGAGT
TCAAGAAGTATTCATTCTAGAATACAAAGAAGAGGAAGAAGAAACCTCTACAGAAGAAAGTGATGGATCA
TCTACTTCTGAAGACTCAGACTCAGACTGAGCAGGTGATGAACGTCACCAATCCCAATTCGATCTACATC
AAGGGAAGACTCTACTTCAAGGGATACAAGAAGATAGAACTTCACTGTTTCGTAGACACGGGAGCAAGCC
TATGCATAGCATCCAAGTTCGTCATACCAGAAGAACATTGGGTCAATGCAGAAAGACCAATTATGGTCAA
AATAGCAGATGGAAGCTCAATCACCATCAGCAAAGTCTGCAAAGACATAGACTTGATCATAGCCGGCGAG
ATATTCAGAATTCCCACCGTCTATCAGCAAGAAAGTGGCATCGATTTCATTATCGGCAACAACTTCTGTC
AGCTGTATGAACCATTCATACAGTTTACGGATAGAGTTATCTTCACAAAGAACAAGTCTTATCCTGTTCA
TATTGCGAAGCTAACCAGAGCAGTGCGAGTAGGCACCGAAGGATT TCTTGAATCAATGAAGAAACGTTCA
AAAACTCAACAACCAGAGCCAGTGAACATTTCTACAAACAAGATAGAAAATCCACTAGAAGAAATTGCTA
TTCTTTCAGAGGGGAGGAGGTTATCAGAAGAAAAACTCTTTATCACTCAACAAAGAATGCAAAAAATCGA
AGAACTACTTGAGAAAGTATGTTCAGAAAATCCATTAGATCCTAACAAGACTAAGCAATGGATGAAAGCT
TCTATCAAGCTCAGCGACCCAAGCAAAGCTATCAAGGTTAAACCCATGAAGTATAGCCCAATGGATCGCG
AAGAATTTGACAAGCAAATCAAAGAATTACTGGACCTAAAAGTCATCAAGCCCAGTAAAAGCCCTCACAT
GGCACCAGCCTTCTTGGTCAACAATGAAGCCGAGAAGCGAAGAGGAAAGAAACGTATGGTAGTCAACTAC
AAAGCTATGAACAAAGCTACTGTAGGAGATGCCTACAATCTTCCCAACAAAGACGAGTTACTTACACTCA
TTCGAGGAAAGAAGATCTTCTCTTCCTTCGACTGTAAGTCAGGATTCTGGCAAGTTCTGCTAGATCAAGA
ATCAAGACCTCTAACGGCATTCACATGTCCACAAGGTCACTACGAATGGAATGTGGTCCCTTTCGGCTTA
AAGCAAGCTCCATCCATATTCCAAAGACACATGGACGAAGCATTTCGTGTGTTCAGAAAGTTCTGTTGCG
TTTATGTCGACGACATTCTCGTATTCAGTAACAACGAAGAAGATCATCTACTTCACGTAGCAATGATCTT
ACAAAAGTGTAATCAACATGGAATTATCCTTTCCAAGAAGAAAGCACAACTCTTCAAGAAGAAGATAAAC
TTCCTTGGTCTAGAAATAGATGAAGGAACACATAAGCCTCAAGGACATATCTTGGAACACATCAACAAGT
TCCCCGATACCCTTGAAGACAAGAAGCAACTTCAGAGATTCTTAGGCATACTAACATATGCCTCGGATTA
CATCCCGAAGCTAGCTCAAATCAGAAAGCCTCTGCAAGCCAAGCTTAAAGAAAACGTTCCATGGAGATGG
ACAAAAGAGGATACCCTCTACATGCAAAAGGTGAAGAAAAATCTGCAAGGATTTCCTCCACTACATCATC
CCTTACCAGAGGAGAAGCTGATCATCGAGACCGATGCATCAGACGACTACTGGGGAGGTATGTTAAAAGC
TATCAAAATTAACGAAGGTACTAATACTGAGTTAATTTGCAGATACGCATCTGGAAGCTTTAAAGCTGCA
GAAAAGAATTACCACAGCAATGACAAAGAGACATTGGCGGTAATAAATACTATAAAGAAATTTAGTATTT
ATCTAACTCCTGTTCATT TTCTGATTAGGACAGATAATACTCATTTCAAGAGTTTCGTTAATCTCAATTA
CAAAGGAGATTCGAAACTTGGAAGAAACATCAGATGGCAAGCATGGCTTAGCCACTATTCATTTGATGTT
GAACACATTAAAGGAACCGACAACCACTTTGCGGACTTCCTTTCAAGAGAATTCAATAAGGTTAATTCCT
AATTGAAATCCGAAGATAAGATTCCCACACACTTGTGGCTGATATCAAAAGGCTACTGCCTATTTAAACA
CATCTCTGGAGACTGAGAAAATCAGACCTCCAAGCATGGAGAACATAGAAAAACTCCTCATGCAAGAGAA
AATACTAATGCTAGAGCTCGATCTAGTAAGAGCAAAAATAAGCTTAGCAAGAGCTAACGGCTCTTCGCAA
CAAGGAGACCTCTCTCTCCACCGTGAAACACCGGAAAAAGAAGAAGCAGTTCATTCTGCACTGGCTACTT
TTACGCCATCTCAAGTAAAAGCTATTCCAGAGCAAACGGCTCCTGGTAAAGAATCAACAAATCCGTTGAT
GGCTAATATCTTGCCAAAAGATATGAATTCAGTTCAGACTGAAATTAGGCCCGTAAAGCCATCGGACTTC
TTACGTCCACATCAGGGAATTCCAATCCCACCAAAACCTGAACCTAGCAGTTCAGTTGCTCCTCTCAGAG
ACGAATCGGGTATTCAACACCCTCATACCAACTACTACGTCGTGTATAACGGACCTCATGCCGGTATATA
CGATGACTGGGGTTGTACAAAGGCAGCAACAAACGGTGTTCCCGGAGTTGCGCATAAGAAGTTTGCCACT
ATTACAGAGGCAAGAGCAGCAGCTGACGCGTATACAACAAGTCAGCAAACAGATAGGTTGAACTTCATCC
CCAAAGGAGAAGCTCAACTCAAGCCCAAGAGCTTTGCGAAGGCCTTAACAAGCCCACCAAAGCAAAAAGC
CCACTGGCTCATGCTAGGAACTAAAAAGCCCAGCAGTGATCCAGCCCCAAAAGAGATCTCCTTTGCCCCA
GAGATCACAATGGACGACTTCCTCTATCTCTACGATCTAGTCAGGAAGTTCGACGGAGAAGGTGACGATA
CCATGTTCACCACTGATAATGAGAAGATTAGCCTTTTCAATTTCAGAAAGAATGCTAACCCACAGATGGT
TAGAGAGGCTTACGCAGCAGGTCTCATCAAGACGATCTACCCGAGCAATAATCTCCAGGAGATCAAATAC
CTTCCCAAGAAGGTTAAAGATGCAGTCAAAAGATTCAGGACTAACTGCATCAAGAACACAGAGAAAGATA
TATTTCTCAAGATCAGAAGTACTATTCCAGTATGGACGATTCAAGGCTTGCTTCACAAACCAAGGCAAGT
AATAGAGATTGGAGTCTCTAAAAAGGTAGTTCCCACTGAATCAAAGGCCATGGAGTCAAAGATTCAAATA
GAGGACCTAACAGAACTCGCCGTAAAGACTGGCGAACAGTTCATACAGAGTCTCTTACGACTCAATGACA
AGAAGAAAATCTTCGTCAACATGGTGGAGCACGACACGCTTGTCTACTCCAAAAATATCAAAGATACAGT
CTCAGAAGACCAAAGGGCAATTGAGACTTTTCAACAAAGGGTAATATCCGGAAACCTCCTCGGATTCCAT
TGCCCAGCTATCTGTCACTTTATTGTGAAGATAGTGGAAAAGGAAGGTGGCTCCTACAAATGCCATCATT
GCGATAAAGGAAAGGCCATCGTTGAAGATGCCTCTGCCGACAGTGGTCCCAAAGATGGACCCCCACCCAC
GAGGAGCATCGTGGAAAAAGAAGACGTTCCAACCACGTCTTCAAAGCAAGTGGATTGATGTGATATCTCC
ACTGACGTAAGGGATGACGCACAATCCCACTATCCTTCGCAAGACCCTTCCTCTATATAAGGAAGTTCAT
TTCATTTGGAGAGGACACGCTGAAATCACCAGTCTCTCTCTACAAATCTATCTCTCTCTATAATAATGTG
TGAGTAGTTCCCAGATAAGGGAATTAGGGTTCTTATAGGGTTTCGCTCATGTGTTGAGCATATAAGAAAC
CCTTAGTATGTATTTGTATTTGTAAAATACTTCTATCAATAAAATTTCTAATTCCTAAAACCAAAATCCA
GTACTAAAATCCAGATCTCCTAAAGTCCCTATAGATCTTTGTGGTGAATATAAACCAGACACGAGACGAC
TAAACCTGGAGCCCAGACGCCGTTTGAAGCTAGAAGTACCGCTTAGGCAGGAGGCCGTTAGGGAAAAGAT
GCTAAGGCAGGGTTGGTTACGTTGACTCCCCCGTAGGTTTGGTTTAAATATCATGAAGTGGACGGAAGGA
AGGAGGAAGACAAGGAAGGATAAGGTTGCAGGCCCTGTGCAAGGTAAGACGATGGAAATTTGATAGAGGT
ACGTTACTATACTTATACTATACGCTAAGGGAATGCTTGTATTTACCCTATATACCCTAATGACCCCTTA
TCGATTTAAAGAAATAATCCGCATAAGCCCCCGCTTAAAAAATT
Tomato mosaic virus (genomic DNA, Accession Number: NC_002692.1) (SEQ ID
NO: 432):
GTATTTTTACAACAATTACCAACAACAACAACAAACAACAACAACATTACATTTTACATTCTACAACTAC
AATGGCATACACACAAACAGCCACATCGTCCGCTTTGCTTGAGACCGTCCGAGGTAACAATACCTTGGTC
AACGATCTTGCAAAGCGGCGTCTATATGACACAGCGGTAGATGAATTTAATGCTAGGGACCGCAGGCCTA
AAGTCAATTTTTCCAAAGTAGTAAGCGAAGAACAGACGCTTATTGCAACCAAAGCCTACCCAGAATTCCA
AATTACATTCTACAACACGCAGAATGCTGTGCATTCCCTTGCAGGCGGTCTCCGATCATTAGAATTGGAA
TATCTGATGATGCAAATTCCCTACGGATCATTGACATATGATATCGGAGGTAATTTTGCATCTCATCTGT
TCAAAGGGCGAGCATACGTTCACTGCTGTATGCCGAATCTAGATGTCCGCGACATAATGCGGCACGAGGG
CCAAAAGGACAGTATTGAACTATACCTTTCTAGGCTCGAGAGGGGCAACAAACATGTCCCAAACTTCCAA
AAGGAAGCTTTCGACAGATACGCTGAAATGCCAAACGAAGTAGTCTGTCACGATACTTTCCAAACGTGTA
GGCATTCTCAAGAATGTTACACGGGAAGAGTGTATGCTATTGCTTTGCATAGTATATACGATATACCTGC
CGACGAGTTCGGCGCGGCACTGCTGAGAAAGAATGTACATGTATGTTATGCCGCTTTCCACTTTTCCGAG
AATTTACTTCTCGAAGATTCACACGTCAACCTCGATGAGATCAATGCATGTT TCCAAAGAGATGGAGACA
GGTTGACTTTTTCCTTTGCATCTGAGAGTACTCTTAATTATAGTCATAGTTATTCTAATATTCTTAAGTA
TGTTTGCAAAACTTACTTCCCAGCCTCTAATAGAGAGGTTTACATGAAGGAGTTTTTAGTAACTAGAGTT
AATACCTGGTTTTGTAAATTTTCTAGAATAGATACTTTCTTATTGTACAAAGGTGTAGCGCATAAGGGTG
TAGATAGTGAGCAGTTTTACAAGGCTATGGAAGACGCATGGCACTACAAAAAGACTCTTGCGATGTGCAA
CAGTGAAAGAATCTTGTTAGAGGATTCTTCATCAGTTAATTACTGGTTTCCAAAAATGAGGGATATGGTG
ATAGTTCCACTATTTGACATATCTCTCGAGACTAGTAAAAGAACACGCAAAGAGGTCTTAGTTTCAAAGG
ACTTTGTTTATACAGTGTTAAATCACATTCGTACGTACCAGGCCAAAGCGCTTACTTACTCCAACGTGTT
ATCTTTCGTCGAATCAATTCGTTCGAGAGTGATCATTAACGGGGTTACTGCCAGGTCTGAGTGGGATGTC
GATAAATCATTATTACAGTCCTTGTCGATGACGTTCTTCCTACATACCAAGCTTGCCGTTCTGAAAGACG
ATCTTTTGATTAGCAAGTTTGCACTTGGACCAAAAACTGTCTCACAACATGTGTGGGATGAGATTTCCCT
AGCTTTCGGCAATGCTTTCCCATCGATCAAGGAAAGATTGATAAACCGGAAACTGATCAAAATTACGGAG
AATGCGTTAGAGATCAGGGTGCCCGATCTTTATGTCACTTTCCATGATAGGTTAGTTTCTGAGTACAAAA
TGTCAGTGGACATGCCGGTGCTAGACATTAGGAAAAAGATGGAAGAAACTGAGGAAATGTACAATGCACT
GTCCGAACTGTCTGTACTTAAAAATTCAGACAAGTTCGATGTTGATGTTTTTTCCCAGATGTGCCAATCT
TTAGAAGTTGATCCAATGACTGCAGCAAAGGTAATAGTAGCAGTTATGAGCAACGAGAGTGGTCTTACTC
TCACGTTTGAACAGCCCACCGAAGCTAATGTTGCGCTAGCATTGCAAGATTCTGAAAAGGCTTCTGATGG
GGCGTTGGTAGTTACCTCAAGAGATGTTGAGGAACCGTCCATAAAGGGTTCGATGGCCCGTGGTGAGTTA
CAATTGGCCGGATTATCTGGCGACGTTCCTGAATCTTCATACACTAGGAGCGAGGAGATTGAGTCTCTCG
AGCAGTTTCATATGGCAACAGCTAGTTCGTTAATTCATAAGCAGATGTGTTCGATCGTGTACACGGGCCC
TCTTAAAGTTCAACAAATGAAAAACTTTATAGACAGCCTGGTAGCCTCGCTCTCTGCTGCGGTGTCGAAT
CTAGTGAAGATCCTAAAAGATACAGCCGCGATTGACCTTGAAACTCGTCAAAAGTTCGGAGTTCTGGATG
TTGCTTCGAAAAGGTGGCTAGTTAAACCATCCGCAAAGAACCATGCATGGGGGGTTGTTGAGACTCATGC
GAGGAAATATCACGTCGCATTACTGGAGCACGATGAATTTGGCATTATTACGTGCGATAACTGGCGACGG
GTGGCTGTGAGTTCTGAGTCGGTAGTATATTCTGATATGGCTAAACTCAGGACTCTGAGAAGATTGCTCA
AAGATGGAGAACCACACGTTAGTTCAGCAAAGGTGGTTTTGGTGGATGGCGTTCCAGGGTGCGGGAAGAC
AAAGGAAATTCTTTCGAGAGTTAATTTCGAAGAAGATCTAATTCTTGTCCCTGGTCGTCAAGCTGCCGAG
ATGATCAGAAGAAGAGCTAATGCGTCGGGCATAATAGTGGCTACAAAGGATAATGTGCGCACCGTCGATT
CATTTTTGATGAATTACGGGAAAGGGGCACGCTGTCAGTTCAAAAGATTGTTCATAGACGAAGGTTTGAT
GCTGCATACTGGTTGTGTGAATTTCTTGGTTGAAATGTCTCTGTGCGATATTGCATATGTTTATGGAGAC
ACCCAACAAATTCCGTACATCAACAGAGTAACTGGTTTCCCGTACCCTGCGCACTTTGCAAAATTGGAGG
TCGACGAAGTCGAAACAAGAAGAACTACTCTTCGCTGTCCGGCTGATGTCACACACTTCCTAAATCAAAG
GTATGAAGGACACGTAATGTGCACGTCTTCTGAAAAGAAATCAGTTTCCCAGGAAATGGTTAGTGGGGCT
GCGTCTATCAATCCTGTGTCCAAGCCGCTTAAAGGGAAAATTTTGACTTTCACACAGTCTGACAAGGAGG
CCCTTCTCTCAAGGGGCTACGCAGATGTCCATACTGTACATGAGGTACAAGGTGAGACTTATGCAGACGT
ATCGTTAGTTCGACTAACACCTACGCCTGTATCTATCATCGCAAGAGACAGTCCGCATGTTCTGGTCTCG
TTGTCAAGACACACAAAATCCCTAAAGTACTACACCGTTGTGATGGATCCTTTAGTTAGTATCATTAGAG
ATTTAGAACGGGTTAGTAGTTACTTATTAGACATGTACAAAGTAGATGCAGGTACTCAATAGCAATTACA
GGTCGACTCTGTGTTTAAAAATTTCAATCTTTTTGTAGCAGCTCCAAAGACTGGAGATATATCTGATATG
CAATTTTACTATGATAAGTGTCTTCCTGGGAACAGCACGTTGTTGAACAACTACGACGCTGTTACCATGA
AATTGACTGACATTTCTCTGAATGTCAAAGATTGCATATTAGATATGTCTAAGTCTGTAGCTGCTCCGAA
AGATGTCAAACCAACTTTAATACCGATGGTACGAACGGCGGCAGAAATGCCTCGCCAGACTGGACTGTTG
GAAAATCTAGTTGCGATGATTAAAAGAAATTTTAATTCACCAGAGTTGTCCGGAGTAGTTGATATTGAAA
ATACTGCATCTTTAGTGGTAGATAAGTTTTTTGATAGTTATTTACTTAAGGAAAAAAGAAAACCAAACAA
AAATTTTTCACTGTTTAGTAGAGAGTCTCTCAATAGGTGGATAGCAAAGCAAGAACAAGTCACAATTGGT
CAGTTGGCCGATTTTGATTTTGTGGATCTTCCAGCCGTTGATCAGTACAGGCATATGATTAAAGCGCAAC
CGAAGCAGAAACTGGATCTGTCAATTCAGACAGAATATCCAGCGTTGCAAACGATTGTGTATCATTCAAA
GAAAATCAACGCAATATTTGGTCCTCTTTTCAGTGAGCTTACAAGGCAATTACTTGACAGTATTGACTCA
AGCAGATTCTTGTTCTTTACGAGAAAGACACCGGCTCAGATCGAAGATTTCTTCGGAGATCTAGACAGTC
ATGTCCCAATGGACGTACTTGAGTTGGATGTTTCGAAGTATGATAAGTCTCAAAACGAGTTTCATTGTGC
TGTTGAGTACGAAATCTGGAGGAGACTGGGTCTGGAGGATTTCTTGGCAGAAGTGTGGAAACAAGGGCAT
AGAAAAACCACCCTGAAAGATTACACTGCTGGTATAAAAACGTGTTTATGGTACCAGAGAAAGAGTGGTG
ATGTTACAACTTTTATCGGTAATACCGTCATCATTGCTTCGTGTCTTGCATCAATGCTCCCGATGGAAAA
ATTGATAAAAGGAGCCTTCTGCGGAGATGACAGTTTGTTGTACTTTCCTAAGGGTTGTGAGTATCCCGAT
ATACAACAAGCTGCCAATCTAATGTGGAATTTTGAGGCCAAACTGTTCAAGAAGCAATATGGGTACTTCT
GCGGGAGGTACGTGATTCATCACGATAGAGGTTGCATAGTATACTACGACCCTTTGAAGCTGATTTCGAA
ACTTGGTGCTAAACACATCAAGGATTGGGATCATTTGGAGGAGTTCAGAAGATCCCTCTGTGATGTTGCT
GAGTCGTTGAACAATTGCGCGTATTACACACAATTGGACGACGCTGTTGGGGAGGTTCATAAAACCGCCC
CACCTGGTTCGTTTGTTTATAAGAGTTTAGTTAAGTATTTGTCAGATAAAGTTTTGTTTAGAAGTTTATT
TCTTGATGGCTCTAGTTGTTAAAGGTAAGGTAAATATTAATGAGTTTATCGATCTGTCAAAGTCTGAGAA
ACTTCTCCCGTCGATGTTCACGCCTGTAAAGAGTGTTATGGTTTCAAAGGTTGATAAGATTATGGTCCAT
GAAAATGAATCATTGTCTGAAGTAAATCTCTTAAAAGGTGTAAAACTTATAGAAGGTGGGTATGTTTGCT
TAGTCGGTCTTGTTGTGTCCGGTGAGTGGAATTTACCAGATAATTGCCGTGGTGGTGTGAGTGTCTGCAT
GGTTGACAAGAGAATGGAAAGAGCGGACGAAGCCACACTGGGGTCATATTACACTGCTGCTGCTAAAAAG
CGGTTTCAGTTTAAAGTGGTCCCAAATTACGGTATTACAACAAAGGATGCAGAAAAGAACATATGGCAGG
TCTTAGTAAATATTAAAAATGTAAAAATGAGTGCGGGCTACTGCCCTTTGTCATTAGAATTTGTGTCTGT
GTGTATTGTTTATAAAAATAATATAAAATTGGGTTTGAGGGAGAAAGTAACGAGTGTGAACGATGGAGGA
CCCATGGAACTTTCAGAAGAAGTTGTTGATGAGTTCATGGAGAATGTTCCAATGTCGGTTAGACTCGCAA
AGTTTCGAACCAAATCCTCAAAAAGAGGTCCGAAAAATAATAATAATTTAGGTAAGGGGCGTTCAGGCGG
AAGGTCTAAACCAAAAAGTTTTGATGAAGTTGAAAAAGAGTTTGATAATTTGATTGAAGATGAAGCCGAG
ACGTCGGTCGCGGATTCTGATTCGTATTAAATATGTCTTACTCAATCACTTCTCCATCGCAATTTGTGTT
TTTGTCATCTGTATGGGCTGACCCTATAGAATTGTTAAACGTTTGTACAAATTCGTTAGGTAACCAGTTT
CAAACACAGCAAGCAAGAACTACTGTTCAACAGCAGTTCAGCGAGGTGTGGAAACCTTTCCCTCAGAGCA
CCGTCAGATTTCCTGGCGATGTTTATAAGGTGTACAGGTACAATGCAGTTTTAGATCCTCTAATTACTGC
GTTGCTGGGGGCTTTCGATACTAGGAATAGAATAATCGAAGTAGAAAACCAGCAGAGTCCGACAACAGCT
GAAACGTTAGATGCTACCCGCAGGGTAGACGACGCTACGGTTGCAATTCGGTCTGCTATAAATAATTTAG
TTAATGAACTAGTAAGAGGTACTGGACTGTACAATCAGAATACTTTTGAAAGTATGTCTGGGTTGGTCTG
GACCTCTGCACCTGCATCTTAAATGCATAGGTGCTGAAATATAAATTTTGTGTTTCTAAAACACACGTGG
TACGTACGATAACGTACAGTGTTTTTCCCTCCACTTAAATCGAAGGGTAGTGTCTTGGAGCGCGCGGAGT
AAACATATATGGTTCATATATGTCCGTAGGCACGTAAAAAAGCGAGGGATTCGAATTCCCCCGGAACCCC
CGGTTGGGGCCCA
Pepper mild mottle virus (genomic DNA, Accession Number: NC_003630.1) (SEQ ID
NO: 433):
GTAAATTTTTCACAATTTAACAACAACAACACAAACAACAAACAACATTACAAACAAAATACAACTACAA
TGGCTTACACACAACAAGCTACCAACGCCGCATTAGCAAGTACTCTCCGAGGGAATAACCCCTTGGTGAA
CGATCTTGCTAATCGGAGACTGTACGAATCAGCGGTCGAACAATGCAATGCACATGACCGCAGGCCCAAG
GTTAATTTTTTAAGGTCGATAAGCGAAGAGCAGACGCTTATCGCAACTAAGGCCTACCCTGAGTTCCAAA
TCACGTTCTACAACACGCAGAACGCTGTGCACAGTCTCGCAGGTGGACTTCGGTCTTTGGAACTAGAATA
CTTGATGATGCAGATCCCCTACGGTTCAACGACATATGATATCGGGGGAAATTTTGCTGCTCACATGTTT
AAAGGTCGTGACTACGTTCATTGCTGCATGCCTAACATGGACTTACGTGACGTCATGCGTCACAATGCTC
AAAAGGATAGCATTGAACTGTACCTTTCAAAGCTTGCGCAAAAGAAAAAGGTAATACCGCCATATCAAAA
GCCATGCTTTGATAAATACACGGACGATCCGCAATCAGTAGTGTGCTCGAAACCTTTTCAGCACTGCGAA
GGCGTTTCGCACTGCACGGATAAAGTATACGCTGTCGCTTTGCACAGTTTATACGACATTCCAGCAGATG
AATTTGGGGCAGCACTTCTGAGGAGAAATGTTCATGTCTGCTATGCTGCCTTCCACTTTTCTGAGAATCT
TCTTTTAGAAGATTCGTATGTCAGTCTTGACGACATAGGCGCTTTCTTCTCGAGAGAGGGCGATATGTTG
AACTTTTCTTTTGTAGCAGAGAGTACTTTAAATTATACTCATTCCTATAGTAATGTGCTTAAGTATGTGT
GTAAGACTTACTTCCCCGCTTCTAGTAGAGAAGTGTACATGAAGGAGTTTTTGGTAACTAGGGTAAATAC
TTGGTTTTGTAAGTTTTCAAGGTTAGATACCTTTGTACTATATAGAGGTGTATACCACAGAGGTGTAGAC
AAGGAGCAATTTTACAGTGCAATGGAAGATGCTTGGCATTACAAAAAGACTTTGGCGATGATGAATAGCG
AAAGAATCCTCTTAGAGGATTCATCGTCTGTTAATTATTGGTTTCCAAAGATGAAAGATATGGTGATAGT
ACCTTTGTTCGACGTATCTTTACAGAACGAGGGGAAAAGGTTAGCAAGAAAGGAGGTCATGGTCAGCAAG
GACTTCGTTTATACTGTGCTTAATCATATTCGCACATACCAGTCGAAAGCGCTTACTTACGCCAATGTAT
TATCGTTCGTTGAGTCGATAAGATCAAGAGTGATAATCAATGGGGTGACTGCGCGCTCAGAGTGGGATGT
GGATAAGGCTTTGTTGCAGTCCCTGTCAATGACTTTTTTCTTGCAGACCAAATTGGCCATGCTCAAGGAT
GACCTCGTGGTTCAGAAATTCCAAGTGCATTCCAAATCGCTCACTGAATATGTCTGGGATGAGATTACTG
CTGCTTTTCACAATTGTTTTCCTACAATCAAGGAGAGGTTGATTAACAAGAAACTCATAACTGTTTCGGA
AAAGGCTCTTGAAATTAAAGTACCTGATTTGTATGTAACTTTCCACGATAGATTGGTTAAGGAGTACAAG
TCTTCGGTGGAAATGCCGGTACTGGACGTTAAAAAGAGCTTGGAAGAAGCAGAAGTGATGTACAATGCTT
TGTCAGAAATCTCAATTCTTAAAGACAGTGACAAGTTTGATGTTGATGTTTTTTCCCGGATGTGTAATAC
ATTAGGCGTAGATCCATTGGTGGCAGCAAAGGTAATGGTAGCTGTGGTTTCAAATGAGAGTGGTTTGACC
TTAACGTTTGAGAGGCCTACCGAAGCAAATGTCGCACTTGCATTGCAACCGACAATTACATCAAAGGAGG
AAGGTTCGTTGAAGATTGTGTCGTCAGACGTAGGTGAGTCCTCAATCAAGGAAGTGGTTCGAAAATCAGA
GATTTCTATGCTTGGTCTAACAGGCAACACAGTGTCCGATGAGTTCCAAAGAAGTACAGAAATCGAGTCG
TTGCAGCAGTTCCATATGGTATCCACAGAGACGATTATCCGTAAACAGATGCATGCGATGGTGTATACTG
GTCCGCTAAAAGTTCAACAATGCAAGAACTATTTAGACAGCCTGGTAGCCTCGCTCTCTGCTGCGGTATC
AAACCTGAAGAAGATAATCAAAGACACAGCTGCTATAGATCTCGAGACTAAGGAAAAATTTGGAGTCTAC
GACGTGTGCCTTAAGAAATGGTTGGTGAAACCTCTATCAAAAGGACATGCTTGGGGTGTGGTGATGGACT
CAGACTATAAGTGCTTTGTTGCGCTTCTCACATACGATGGCGAGAACATTGTGTGCGGAGAGACATGGCG
TAGAGTCGCAGTGAGCTCCGAATCTTTGGTGTATTCAGATATGGGGAAGATAAGAGCTATACGCTCTGTG
CTTAAAGACGGTGAACCCCATATAAGCAGTGCAAAGGTTACACTTGTTGATGGTGTTCCTGGTTGCGGAA
AGACAAAGGAGATTCTTTCGAGGGTCAACTTTGACGAAGATCTAGTTCTGGTACCAGGAAAACAGGCTGC
TGAAATGATAAGAAGAAGGGCAAACAGTTCTGGTTTAATCGTGGCGACCAAGGAGAATGTAAGGACGGTA
GACTCTTTCTTAATGAATTACGGTCGAGGTCCGTGCCAATACAAAAGGCTGTTTCTGGATGAAGGTCTAA
TGTTACACCCTGGTTGTGTTAATTTTCTGGTTGGCATGTCTCTATGCTCCGAGGCTTTTGTTTATGGAGA
CACCCAGCAGATTCCTTACATCAACAGAGTTGCAACTTTTCCCTATCCTAAGCATTTGAGTCAACTCGAG
GTCGATGCTGTTGAAACTCGCAGAACAACGTTGCGGTGTCCAGCTGATATCACCTTCTTCTTGAATCAGA
AGTACGAAGGGCAAGTTATGTGCACATCAAGTGTTACACGCTCGGTGTCACACGAGGTCATCCAAGGTGC
AGCGGTAATGAATCCAGTGTCTAAACCACTTAAAGGGAAGGTGATTACATTCACTCAGTCAGACAAGTCA
TTGCTGCTCTCGAGGGGTTACGAAGATGTGCATACCGTTCATGAGGTGCAAGGGGAAACGTTTGAAGACG
TCTCACTAGTGAGGCTGACGCCAACACCCGTGGGAATAATTTCAAAGCAGAGTCCGCACCTGTTGGTCTC
ATTGTCTAGGCATACAAGGTCGATCAAATATTACACAGTTGTGCTAGATGCAGTCGTTTCAGTGCTTAGA
GATCTGGAGTGTGTGAGTAGTTACCTGTTAGATATGTACAAAGTTGATGTGTCGACTCAATAGCAATTAC
AGATAGAATCGGTGTACAAAGGTGTTAACCTTTTCGTCGCAGCACCAAAAACAGGAGATGTTTCTGACAT
GCAATATTATTACGACAAGTGTTTGCCGGGAAACAGTACTATACTCAATGAGTATGATGCTGTAACTATG
CAAATACGAGAGAATAGTTTGAATGTCAAGGATTGTGTGTTGGATATGTCGAAATCGGTGCCTCTTCCGA
GAGAATCTGAGACGACATTGAAACCTGTGATCAGGACTGCTGCTGAAAAACCTCGAAAACCTGGATTGTT
GGAAAATTTGGTCGCGATGATCAAAAGAAATTTCAACTCTCCCGAATTAGTAGGGGTTGTTGACATCGAA
GACACCGCTTCTCTAGTAGTAGATAAGTTTTTTGATGCATACTTAATTAAAGAAAAGAAAAAACCAAAAA
ATATACCTCTGCTTTCAAGGGCGAGTTTGGAAAGATGGATCGAAAAGCAAGAGAAGTCAACAATTGGCCA
GTTGGCTGATTTTGACTTTATTGATTTACCAGCCGTTGATCAATACAGGCACATGATCAAGCAGCAGCCG
AAACAGCGTTTGGATCTTAGTATTCAAACTGAATACCCGGCTTTGCAAACTATTGTGTATCATAGCAAGA
AAATCAATGCGCTTTTTGGTCCTGTATTTTCAGAATTAACAAGACAGCTGCTAGAGACAATTGACAGTTC
AAGATTCATGTTTTATACAAGGAAAACGCCTACACAGATCGAAGAATTTTTCTCAGATCTGGACTCTAAT
GTTCCTATGGACATATTAGAGCTAGACATTTCCAAGTATGACAAATCACAGAACGAATTTCATTGTGCAG
TCGAGTATGAGATTTGGAAAAGGTTAGGCTTAGACGATTTCTTGGCTGAAGTTTGGAAACACGGGCATCG
GAAGACAACGTTGAAAGACTACACAGCCGGAATAAAAACGTGTTTGTGGTACCAGAGGAAAAGCGGTGAT
GTCACCACATTCATTGGAAACACGATCATTATTGCTGCATGTCTGTCCTCTATGCTACCGATGGAGAGAT
TGATTAAAGGTGCCTTTTGTGGTGATGATAGTATATTATACTTTCCAAAGGGCACTGATTTCCCCGATAT
TCAACAGGGCGCAAACCTTCTCTGGAATTTTGAAGCCAAGTTGTTTAGGAAGAGATATGGTTACTTTTGC
GGTAGGTACATAATTCACCATGACAGAGGCTGTATTGTATATTATGACCCTCTAAAATTGATCTCGAAAC
TCGGTGCAAAACACATCAAGAATAGAGAACATTTAGAGGAATTTAGGACCTCTCTTTGTGATGTTGCTGG
GTCGTTGAACAATTGTGCGTACTATACACATTTGAACGACGCTGTCGGTGAGGTTATTAAGACCGCACCT
CTTGGTTCGTTTGTTTATAGAGCATTAGTTAAGTACTTGTGTGATAAAAGGTTATTTCAAACATTGTTTT
TGGAGTAAATGGCGTTAGTAGTCAAGGACGACGTTAAGATTTCTGAGTTCATCAATTTGTCTGCCGCTGA
GAAATTCTTACCTGCTGTTATGACTTCGGTCAAGACGGTACGAATTTCGAAAGTTGACAAAGTGATTGCA
ATGGAAAACGATTCGTTATCCGATGTGAATTTGCTTAAAGGTGTAAAGCTTGTTAAGGATGGTTATGTGT
GTTTAGCAGGGTTAGTTGTGTCCGGGGAGTGGAACCTACCCGACAACTGCAGAGGTGGAGTAAGCGTTTG
TTTGGTTGATAAGAGAATGCAAAGAGATGACGAAGCAACACTTGGATCTTATAGAACCAGTGCAGCTAAG
AAACGATTTGCCTTCAAATTGATCCCGAATTATAGCATTACTACCGCCGATGCTGAGAGAAAAGTTTGGC
AAGTTTTAGTTAATATTAGAGGTGTTGCCATGGAAAAGGGTTTCTGTCCTTTATCTTTGGAGTTTGTCTC
AGTTTGTATTGTACACAAATCCAATATAAAATTAGGCTTGAGAGAGAAAATTACTAGTGTGTCAGAAGGA
GGACCCGTTGAACTTACAGAAGCAGTCGTTGATGAGTTCATCGAATCAGTTCCAATGGCTGACAGATTAC
GTAAATTTCGCAATCAATCTAAGAAAGGAAGTAATAAGTATGTAGGTAAGAGAAATGATAATAAGGGTTT
GAATAAGGAAGGGAAGCTGTTTGATAAGGTTAGAATTGGGCAGAACTCGGAGTCATCGGACGCCGAGTCT
TCTTCGTTTTAACTATGGCTTACACAGTTTCCAGTGCCAATCAATTAGTGTATTTAGGTTCTGTATGGGC
TGATCCATTAGAGTTACAAAATCTGTGTACTTCGGCGTTAGGCAATCAGTTTCAAACACAACAGGCTAGA
ACTACGGTTCAACAGCAGTTCTCTGATGTGTGGAAGACTATTCCGACCGCTACAGTTAGATTTCCTGCTA
CTGGTTTCAAAGTTTTCCGATATAATGCCGTGCTAGATTCTCTAGTGTCGGCACTTCTCGGAGCCTTTGA
TACTAGGAACAGGATAATAGAAGTTGAAAATCCGCAAAATCCTACAACTGCCGAGACGCTTGATGCGACG
AGGCGGGTAGACGATGCGACGGTGGCCATTAGGGCCAGTATAAGTAACCTCATGAATGAGTTAGTTCGTG
GCACGGGAATGTACAATCAAGCTCTGTTCGAGAGCGCGAGTGGACTCACCTGGGCTACAACTCCTTAAAC
ATGATGGCATAAATAAGTTGAACGAACATTAAACGTCCGTGGCGAGTACGATAACTCGTAGTGTTTTTCC
CTCCACTTAAATCGAAGGGTTGTCGTTGGGATGGAACGCAATTAAATACATGTGTGACGTGTATTTGCGA
ACGACGTAATTATTTTTCAGGGGTTCGAATCCCCCCCGAACCGCGGGTAGCGGCCCA
Citrus yellow mosaic virus (genomic DNA, Accession Number: NC_003382.1) (SEQ ID
NO: 434):
TGGTATCAGAGCTTGGTTATGTTCTTACAACGATGGGAGCTTAAGTTCTTCCATTAGGTCTGAGGAAAGA
GTTGGTTGTATGGTGTGTTTAGTTCCTATCTGTATTGTTATTCCTGTGTTCATGATATAGAAAACGATCA
TCGCGAAAAGGGTGAAGGCACTATATCTGGCAGCGAGAGGAGAGTAAGTCCAGTGAAACCCTTCGCATGA
CGCTAAAGGTGATCTAATCTATGTCTAGAATTTGGGAAGAAGCAATACAGAAATGGTATGAGACATCCCA
TACAGCTAATCTCGAGTACTTAGATCTAGCTTCAAAACCAAAAGTTTCCAATTCAGAAATTTCACACAAC
CTTGCTGTAGTTTATGATCGTTTGAATCTGTTTAGCCGTGTCTCTATTAAAAATTTCAAAAGTATCCAAG
AAACCTTAGAAAAACAAGACCTTAGAATTCGAAAGCTTGAGTCTAGTTTGAAAACCTTAACCAGTGAGTT
TATAGCCCATAAACCTTTGTCCAAAAGTGAGGTAAAAGCCTTAGTCACAGAAATTGCCAAACAGCCAAAG
CTTGTTGAAGCACAGGCCCTTCAGTTGACCGAGTCTCTTAACCAAAAGCTTGATAGGGTTGAAACCCTAA
TAGCTAAGGTTGAACGGTGGGTTCATTCATGACCTACCAGAATACTGAAAAGACTCCTACATACAAAAGA
GCTTTAGAAGCAACCGAGCCTATCAACAGTCCCGCCCTAGGTTTTATAAATCCAGAAGATTATTCAGGAG
GCATTACTGGTACGAAGGCTTTGATTAAGCAAAACAACCTGCTCATTCAACTTGTGGTGGAACTTTCTGT
CAACGTCAACAGCTTATCTGAACAGGTTGCTCAACTTACAAGGCAACTTGGAAAGCAACCCCAGCAAGGC
TCATCAACAGCAACCTTACCTGACGATTTGGTTGACAAACTCAAGAACCTTTCCTTAGGTACTGAGAAAA
AGAAGGAGAAGCGTGGTACCTTCTACGCTTACAAAGACCCATACCTGATCTACAAGGAAGAGGTAGAAAA
GTTAAAGAAGCAACAACAATGAGTACCAGTCGTGCTCGTACAGTTATAGAGCAACTCCCTCCGGCTACAA
CAGCTCGGGTGGAAGAAAGGGATAATACTCCCCTCTATGATGACCAAATCAGAGATTATAGGCAGTGGCA
GCGGCGGCGGCACAACATGGGGCGGAGATGGAATCAGTTGATAGGACGACCCTACAATCAGACCTTGGAA
CAGGTTGTGGACCCTGAAGTAGCTTTACAGCTATCAATGCAGGAGCGTGCCAGACTAGTACCAGCAGAGG
TACTTTACAGATCAAGAACTGATGATCGGCACCATCAAGTCTACATTCACAAGTCAGAGGAGGCTATCCT
TTGTGTAGATGGTGATCAAGTTGACCGGTTACTAATTCAACCGGAAAGTGCTGAACAGTTAAGCAGGAGC
GGTATGTCCTTCATTCATATGGGCATAGTTCAGGTTCGGATCCAGATCTTACACAGACAGCATGAGGGAA
CAACAGCCCTTGTGGTGTTTAGAGACAATCGGTGGCAAGGAGACCAGTCAATATTTGCCACCATGGAGCT
GGATTTAACTAAAGGTATGCAGATGGTGTACATAATCCCGGACACCATGATGACAGTCAGAGACTTCTGC
CGGAATGTTCAAATTTCCATATTAACAAAAGGATATGGGAATTGGCAGAATGGCGAGGCAAATCTGCTTG
TTACAAGGGGAATTGTTGGACGGTTATCAAATACCCCTAATGTGGCCTTTGCCTATCAGATCCAAAATGT
TACCGACTACTTGGTCAGTCATGGAATTCAGGCCCTGCCAGGACGGCGATATTCTACTGCAGATATACAG
GGCCAACAATGGTTCCTAAGACCATCCAATATCCCAGCAGTCCCAATGGCCCCCACCAACGTGGATACAA
GAAACATGATTGATGGATCTATTTCTCTTAGATTCAACAGTTACCAACCAGCTCCAGATCCAACCCCTGT
TGCTTATAATCAGCATGATGAGGAAGTACCCCCTGATGAAGATGAAGAGCAGATCCGTAATCATACCATC
GCTTTATGGCGGGAAGATGACGAGGTATGGGATACACTTGGTGAACCTTCGGGCAAATTTGATTTTTATG
TCCGTTATACTCGACCTGCACATGCTCTACAAGATCCTGCTCATATTGTTGCTACTGGATGGGATGACCT
TGACAATGATCCATCCACCTCAAGTCCTTCTAATAATATCCTTACTTACCTCACCCCTTCTTCCTCTTCT
GATGAGGATGATGACATGTCCTATCTCCAATACCTTGCTCAACAATCACCTGTTCCTTCTCCTACACAGG
ATTTCACCAATCCTTTTTCGGAAGGTGGTGGGGAATCTACCTACCCTTACCCCTCATTTCAACCACCATT
CGACCTTCAATCAGACGACTCATATGGTACTTTGGCAACTTGGAGTGAATATGATGCTATGAGTCAATCA
AACAGTCCTTCATCACACTCAGATGCTATTCAACATCTTAGTTTCCAGCACCCAAGTGCAGATACTGTCC
TTGATTTTGACAGATATTCTTTTACAACAAGTGAGGATGACGTGGTTCAATCAGCCTGGATATCTGAAAA
TCTATTTCGTGAAAACACCGGAAACGGTGAAGTTCACAATCTTGTTCCACCTAGACCGGACACCCCTCGG
GGTGATGAGGTCAAAGGAACTCAGGAATCCATGGCCCATACTGTTGCAGTAACCACAGAGGAATCAAAAC
ATGAGGCTGAATTTGACTATCCGGCTTTTGCCAGATTACAAGCCCATGAAGAGTCAGGGCGGCCCAAACC
CAAAACTGAGAAAGTCTTATCCTCAGCAATTTCTTCATATACCCCACCAACGGATACTGCAATGACACCT
GTTGCGTACCCCCCAGCCCAAAATATAGCCAGCCCAAGTTACAATCCAAGCCCACAAATGCCCATGTTCG
AAGGGTATTATCCCAAAAGGCCAAATTTTAAGAGGGATAATCATGCCTTTATCAGTCTTCCCTCGGCCCA
ACAAAATACTGGGGCTTTATTCATTATGCCTCAACAAATTGGCCTGTTTCATGAGGTTTTTACTTCATGG
GAAGCTATAACAAAGGCCTATGTTGCTCAACAGGGTATCACAGACCCAAGGGATAAAGCCGAGTTCATTG
AAAACATGTTGGGTCCAACAGAAAAGATAATTTGGACTCAATGGCGTATGGGCTACGCCGATGAATATGA
GAACCTTGTTACAACTGCTGATGGTCGTGAGGGTACTCAAAATATACTCTCTCAGATGCGAAGGGTCTTT
TCCTTAGAAGATCCAACCACAGGTTCAACTGCAGTCCAAGATGAAGCCTACAGAGACTTGGAGAGGCTTA
CTTGTGATTCTGTCAAGCATATAGTCCAATACTTAAATGACTTTATGCGGATTGCAGCAAAGACTGGGCG
CATGTTCATAGGCCCAGAATTGAGTGAAAAGTTATGGCTTAAAATGCCAGGTGACCTAGGCCAAAGAATG
AAGAAGGCCTATGAAGAAAAACATCCAGGGAACATTGTTGGTGTTTGCCCTCGGATTCTGTTTGCTTATA
AGTACCTTGAAGGCGAATGCAAAGATGCAGCGTTCAGACGCTCCCTGAAAAATCTATCCTTTTGCAGCTC
AATCCCTATCCCAGGCTATTACGGTGGTAAAAGTGGAGAGAAACGTTATGGTGTAAGGCGCACAACCACT
TATAAGGGAAAGCCTCATAGCACCCATGCAAGGATTGAAAAGACAAAACATTTGCGCAATAAAAAGTGCA
AGTGTTATCTGTGTGGGGAAGAAGGTCACTTCGCCCGGGAATGTCCAAATGACCGGCGAAATGTGAAACG
AGTTGCAATGTTCGAAGGTTTAGACCTCCCAGATGACTGTGAGATAGTCTCCATCGATGAAGGTGATCCA
GATAGTGATGCAATCTTCAGTATTTCCGAAGGAGAAGAAGCTGGAACTCTTGAAGAACAATGTTTTGTGT
TCCAGGAAGAATGCAATGGAACATATTGGCTTGGTAAAAGAGGTGGATACCAGGATCTCGTGCAAATCTC
TAAGGAGATCTACTATTGCCAGCATGAATGGGAGGAGAATCAACCCATTAATGATCCAGCACATGTTCGG
TGTTACCCTTGTAAAAGGGAAACCACTCAGAGAGCTCGCTTACATTGCAAGCTATGCCACATAACATCTT
GCCTTATGTGTGGCCCCACCTATTTCAACAAAAAGATTACTGTCCAGCCAATGCCTCAAGCACCCTTCAA
CCAAAAGGGATTGTTACAGCAACAGCAGGAGTACATCGCCTGGTGCAATAATGAAATTGCCAGGTTAAAG
GAAGAAGTTGCTTTTTACAAGCAGCTCGCCCAGGAGAGAGAATTGCAGTTGCAACTTGAGCAATCAAGGA
AGGAGCTAGCAGGAGTAGACTCTCGCAGGCGAAAAGACAAAGGAATAGTAATCGATGAAGGGTCATGCTA
CTTCAATCCTGAAGAAACAACCAGGATAATTGCTCACGGTGACACACAAGTTACCAAAACTCGACCAGTT
AAGAATATGCTCTACAACATGGATGTGCGAATGGAAATTCCAGGCATCCCAGCTTTTACAGTAAAGGCGA
TTCTTGACACAGGAGCAACAACCTGCTGTATTGACAGCAGAAGTGTACCAAAAGATGCCCTTGAAGAGAA
TTCATTTGTGGTAAATTTCTCAGGCATCAATTCCAAGCAACAAGTCAAGCAGAAGCTTAAAACTGGAAAA
ATGTTCATCAATGAGCATTACTTCCGGATCCCATATTGTTACAGCTTTGAGATGCAAATTGGTGATGGCA
TCCAACTTATCCTTGGGTGCAACTTTATACGAAGTATGTATGGTGGTGTACGATTAGAAGGTAATACTAT
AACCTTCTACAAGCAGATAACAAGTATCAACACCAGGCTTGCTGCACCTCTCCTTAAGCAAGAAGAAGAG
GAGAAAGAAGAAGAACTCAACCTGGAAGAGCACAGGTTGATTCAAGAAATGGTTGCATACTCCACTGAGC
GGCCATTTGTTCAATTCCAACAAAAGTTTGCAGGGCTTATTCAAGACTTAAAAGCCCAGGGATACATTGG
GGAAGAGCCTATGAAGTATTGGGCCAAAAACCAAGTTGTTTGCCATCTGGACATTAAAAACCCAGATATG
GTAATTGAAGATCGCCCACTGAAGCATGTGACACCCCAGATGGAAGAAAGCTTTCGCAAGCATGTGGAAG
CCCTGTTAAAAATAGGAGCAATCCGGCCCAGTAAAAGTCGGCACAGAACCACAGCTATAATAGTCAACTC
TGGAACCAGCATAGACCCTATTACAGGGAAGGAGGTTAAGGGAAAGGAGCGAATGGTCTTTAACTATAAA
AGGTTAAATGACCTAACTAATAAAGATCAGTACAGCCTTCCTGGAATCCAGACGATCCTGCAGAGATTAA
AGGGGAGCACAATATTTTCCAAATTCGACCTAAAAAGTGGCTTTCATCAGGTAGCAATGCATCCAGATTC
AATAGAATGGACAGCTTTTTGGGTGCCCAGCGGTCTTTATGAATGGTTAGTTATGCCATTCGGATTAAAG
AATGCTCCAGCAATTTTTCAAAGGAAAATGGATCACTGTTTCAAAGGCACGGAGGCCTTTATTGCCGTCT
ACATCGACGACATCCTAGTATTCTCAAAGACTGAACAGGATCATGAGAAGCATTTACAGATTATGCTCGC
TATCTGTCAAAAGAATGGGCTTATCCTAAGCCCAACAAAGATGAAAATTGCCCAAGCTGAAATTGAATTC
CTTGGGGCAATCATTCACAAAGGGCTTATCAAGTTGCAGCCCCACATTGTTCAAAAGTTGCTCACTTTTA
CCAATAAGCAACTTGAGGAGGTTAAAGGGCTTAGATCATGGCTAGGCCTGCTAAACTATGCAAGGAGCTA
TATTCCCCATATGGGCCGTCTACTTAGCCCATTATATGCCAAAGTCAGCCCAACTGGTGAGCGGAGAATG
AACAGACAAGATTGGGCCCTGATTGACAAAATAAGAGCCCAAGTCCAAAATCTACCAGCCCTGGAATTAC
CACCTGCAGACTGTTTCATCATCATCGAAACGGATGGATGCATGGATGGTTGGGGAGGTGTCTGCAAATG
GAAAGTAGCGCAATACGACCCTCGAAGTTCAGAAAGGGTTTGTGCTTATGCAAGTGGGAAGTTCAACCCA
CCAAAGTCAACAATTGATGCGGAGATACATGCAGTGATGAACAGCCTCAACAACTTCAAAATCTATTACC
TAGACAAGTCCAGTTTATGTTTGAGGACTGACTGTCAAGCTATTATTAGCTTCTTTAATAAGTCCAATGT
TAACAAACCGTCTAGGGTTAGATGGATTGCTTTCACAGATTTCCTTACTGGTCTAGGAATCCCTGTAAAT
ATAGAGCACATAGATGGAAAAAATAACCATCTGGCTGATGCTCTGTCCAGATTAGTAACTGGTTTTGTTT
TTGCAGAACCACAATGTCAAGACAAGTTCCAGGACGATTTAGGGAAATTGGAAGCAGCTCTTCAGGAGAA
GAAAGAGGCTCCGCAAGCAATGCACGTAGAATATGTCTCCCTGTTGATCAGATCAGCGGACCGCATTACC
CGCTCGCTCTGCTTTATGAGGGACTCGTCTCACAGCAGAATTTACTCATGCAGGCCAGGCAAAGAACCAA
TGAAGGCCTTAATCTGCGAACAGAAGTCATGCCAATCCAAAGGCGACTTAGGGAATACGAGGACTGTGCA
CTCCAAGAGTGCATTCAATCAGCAAGACAACTGGTGGCCCTCCACCAGCACAAACTCGCTTACATCAGAA
GCAAAGCTACAAGGGACAACGCATATGCCGATAGGCTACCCACATGCAATCGGGACCACGAGCAACTGTG
TGAAGTGGTCGAGCTATTAGAAGGAATCTCGGAAAGAATCAGCGATACAGCTGTCTAGGACAGCTGGCTT
CAATTATGGAGCGTGATGGACCCCCCCGCAATAATCCAAAGTTTGGTGTGCTTTTAGTAGTGCGTCTTTA
TGGACCACTACTTTATTGTAATAATCGATGCTTTTTGTAGTGCGCTCTTCGTGCGCTCTACTTTATGCTT
TTGCTTTTGTAAGTGCGCTGTAAGTGCGCCTGTCTTTCTTCAGATGCTTATCCTTTAAGCATCTTTTGCT
TTTTGCGTGGCATCCTTTAGTTCACAATTTAAAGAATGACGATGGGGCCCAAGATGTGCACCCGGTTCTC
TAAATTGCCTATATAAGGATATGCCATAGCCTTGTTTTTGCAAGTCAGGAATACCTGAGCATAACTTGGC
TAAGCAAAAGTTTGTAAGTGTTCTAAGCTTTCATTTGTAAACTTTCTGTTTGGTTTTAATAAAATCTCTC
GTCAATCGTTGTGAACATATATTGTTTGTTTGTATTGTTGTATCTTATTTGTTGTGGTGATAATGGTAA
Oat blue dwarf virus (genomic DNA, Accession Number: NC_001793.1) (SEQ ID
NO: 435):
GTGTCCCAGTGTCATTATTCCGCTCAGTTTCAGATCTGCCGGAATTCTCCAAGCATCCCGCCCCAAAAGC
CGGCTGCTTAAAATCTGATCTTCTCCATCTTGTCAAGTGTCGTTATGACCACATACGCCTTCCACCCGCT
GCTCCCCACCCCGACCTCCTTCGCCACTATCACTGGGGGTGGTTTGAAGGATGTTATCGAAACCCTCTCG
TCCACCATCCACAGAGACACGATCGCAGCACCCCTCATGGAGACCCTCGCCTCGCCTTACCGAGACTCCC
TTCGCGACTTCCCTTGGGCCGTCCCCGCCTCCGCCCTGCCCTTCCTCCAGGAATGTGGCATCACGGTCGC
CGGCCACGGTTTCAAAGCTCATCCCCACCCTGTCCACAAAACCATCGAGACCCACCTCCTCCACAAGGTT
TGGCCTCACTATGCCCAAGTCCCTTCTTCCGTCCTCTTCATGAAGCCCTCGAAGTTCGCCAAACTCCAGC
GGGGCAACGCCAACTTCTCCGCACTCCACAACTATCGCCTCACCGCCAAAGACACCCCGCGGTATCCTAA
CACTTCAACCTCTCTCCCCGACACCGAGACCGCCTTCATGCATGACGCCCTCATGTATTACACCCCCGCT
CAAATTGTTGACCTGTTCCTTTCCTGCCCGAAGCTCGAGAAACTGTACGCCTCCCTTGTCGTCCCCCCCG
AGTCCTCCTTCACCTCTATCTCTCTCCATCCAGATCTTTACCGCTTTCGCTTTGACGGGGACCGTTTGAT
TTATGAGTTGGAGGGCAACCCCGCCCACAACTACACCCAACCTCGATCCGCCCTCGACTGGCTCCGCACA
ACCACCATCCGCGGACCAGGCGTTTCTCTCACCGTGTCCAGGCTCGACTCGTGGGGTCCCTGCCATTCCC
TCCTCATCCAGCGCGGCATTCCCCCCATGCACGCCGAGCACGACTCCATCTCGTTCAGGGGTCCACGCGC
CGTCGCCATTCCCGAGCCCTCCTCCCTCCACCAGGATCTGCGCCACCGTCTCGTTCCAGAGGACGTGTAT
AACGCCCTCTTCCTCTACGTCCGCGCTGTCCGCACGCTCCGCGTAACCGATCCCGCCGGCTTTGTCCGCA
CCCAGTGCTCTAAGCCCGAGTACGCTTGGGTCACTTCCTCCGCTTGGGACAACTTGGCCCACTTCGCCCT
CCTCACCGCTCCACACCGGCCCCGCACCTCGTTCTACCTATTCTCCTCTACCTTCCAGCGCCTTGAGCAC
TGGGTCCGCCATCACACCTTCCTCCTCGCCGGCCTCACCACAGCCTTTGCTCTCCCGCCGTCTGCCTGGC
TCGCGAACCTCGTCGCCCGCGCCTCCGCTTCACACATCCAAGGCCTCGCGCTAGCCCGCCGGTGGCTCAT
CACTCCCCCTCATCTCTTCCGCCCCCCTCCACCCCCAAGCTTCGCTCTTCTTCTCCAGCGCAACTCCACC
GGCCCGGTCCTTCTCCGTGGCTCCCGCCTCGAGTTTGAGGCCTTCCCTTCTCTCGCCCCACAACTCGCCC
GTCGCTTTCCATTCCTCGCTCGCCTTCTCCCCCAGAAACCCATCGACCCCTGGGTCGTCGCGAGCCTCGC
TGTCGCCGTTGCTATACCCGCCGCCTCCCTCGCCGTTCGCTGGTTCTTCGGCCCCGACACCCCCCAAGCC
ATGCACGACCGATACCACACCATGTTCCACCCCAGAGAGTGGCGCCTCACCCTGCCCAGGGGCCCCATCT
CATGTGGCCGCTCCAGCTTCTCCCCCCTTCCCCACCCACCTTCGCCCACTCCCGCTCCCGACTCCCGAGC
TGAACCCCTCCAGCCACCCTCCGCTCCACCCTCGACCCACGAGCCGGCTCCCGCCGATCTCGAGCCCCAA
GCTCCTCCGGCCCACGCCCCCCAGACCGAGCCTCCGAGTCCCGTGATCGAGCAAGAAGCGCGTCCGAATC
CCCTTCCCGCTCCTGCCCCGCTTTCTGCTCCCACCCCCTCCGCTTCCGCGCCTTCACTTGCCCCAACACC
CTCGGCCCCCGAGCCTCCCTCGCCGACCGCTTCCGAGCAGGCCGCGTCCCTCATCCCTGCTCCCTCTTCC
GCCCTCGTCGTGGAGCCATCCGGCGTCGTCTCTGCCTCATCTTGGGGCGCCACCAACCAGCCGGCCGATC
AAGTCGATGACTCCCCTCTCGCTCGCGATCCCAGCGCCTCCGGCCCCGTCCGCTTCTATCGAGACCTCTT
CCCCGCCAACTACGCGGGTGATTCCGGCACCTTCGACTTCCGCGCCCGCGCCTCAGGCCGCTCTCCCACC
CCATACCCCGCCATGGATTGCCTCCTCGTCGCCACCGAGCAAGCCACCCGCATCTCTCGAGAGGCCCTCT
GGGACTGCCTCACAGCCACCTGCCCCGACTCATTCCTCGACCCCAAGAGCATCGCCCAGCATGGCCTCAG
CACCGATCACTTCGTCATCCTCGCTCATCGCTTTTCCCTATGTGCCAACTTCCACTCCGCCGAGCACGTC
ATTCAGCTCGGGATGGCCGATGCCACCTCCATTTTCATGATCAACCACACGGCTGGCTCCGCGGGCCTCC
CGGGCCACTTCTCCCTCCGCCTGGGTGACCAGCCCCGTGCCCTCAACGGTGGCCTCGCTCAGGACCTCGC
CGTCGCCGCCCTCCGATTCAACATCTCCGGTGATCTCCTCCCAACCCGATCCGTTCACACTTACAGGTCT
TGGCCAAAGCGCGCCAAGAACCTTGTGTCCAACATGAAGAACGGCTTTGACGGAGTCATGGCCAGCATCA
ACCCGATCCGACCCAGCGATGCTCGCGAGAAGATCGTCGCCCTCGACGGTCTCCTAGACATTGCCCGACC
CCGATCCGTCCGCCTCATCCACATTGCTGGTTTCCCAGGCTGCGGAAAAACACATCCGATCACCAAGCTC
CTCCACACCGCCGCCTTCCGCGACTTCAAACTCGCCGTCCCGACCACCGAGCTCCGGTCTGAGTGGAAAG
AGCTCATGAAGCTCTCACCCTCTCAGGCCTGGCGCTTCGGCACCTGGGAGTCCTCCCTTCTCAAGAGCGC
CAGGATCCTCGTGATCGATGAGATCTACAAGTTGCCCCGAGGGTACCTCGACCTAGCCATCCACTCCGAC
TCGTCCATCGAGTTTGTTATCGCCCTGGGAGATCCTCTGCAAGGCGAGTATCACTCCACTCATCCCAGCT
CCTCCAACTCTCGCCTCATTCCCGAAGTCAGCCATCTCGCTCCCTACCTCGACTACTACTGCCTCTGGAG
TTACCGCGTCCCCCAAGACGTCGCCGCTTTCTTCCAGGTTCAGAGCCACAACCCTGCTCTCGGGTTTGCC
CGTCTCTCGAAGCAGTTTCCCACGACCGGGCGCGTCCTCACCAACTCACAGAACTCGATGCTTACCATGA
CGCAGTGCGGCTACTCTGCCGTCACCATTGCCTCAAGCCAGGGTTCCACCTACAGCGGCGCCACGCACAT
CCACCTTGACCGCAACTCATCGCTCCTCTCCCCTTCGAACTCCCTCGTCGCCCTCACTCGCTCGAGAACC
GGCGTGTTCTTCTCCGGGGACCCTGCTCTTCTCAACGGTGGTCCCAACTCCAACCTCATGTTCTCTGCCT
TCTTTCAGGGCAAGTCTCGCCACATTCGCGCCTGGTTCCCCACCCTTTTCCCTACGGCCACTCTCCTCTT
CTCCCCCCTCCGCCAACGCCACAACCGCCTCACTGGCGCCCTCGCTCCCGCCCAACCTTCCCACCTCCTG
CTCCCTGACCTTCCGAGCCTCCCTCCTCTCCCCGCCTCCGGTCCCTACTCCCGCTCATTCCCAGTTCGAT
CTCGCTTCGCCGCGGCCGTCAAGCCTTCCGACCGGTCAGACGTCCTCTCGTGGGCCCCTATCGCCGTCGG
TGACGGGGAAACCAACGCCCCTCGCATTGACACCTCCTTCCTGCCCGAAACTCGCCGCCCGCTTCATTTT
GATCTTCCCTCGTTCCGCCCCCAAGCCCCACCGCCTCCCTCTGACCCAGCCCCTTCTGGGACCGCCTTTG
AGCCCGTTTACCCCGGCGAAACCTTCGAAAATTTGGTCGCCCACTTCCTTCCGGCTCACGACCCCACTGA
CCGCGAAATCCACTGGCGTCGGCAGCTTTCCAACCAGTTTCCCCATGTCGATAAGGAGTACCACCTCGCG
GCTCAGCCAATGACGCTCCTCGCTCCCATCCACGACTCCAAGCACGACCCCACCCTCCTTGCCGCCTCCA
TCCAGAAACGACTTCGATTTCGACCCTCCGCCTCTCCCTACCGAATCTCCCCTCGTGACGAGCTGCTTGG
CCAGCTCCTCTACGAGAGTCTCTGCCGCGCGTATCATCGTTCCCCAACCACCACCCACCCTTTCGATGAG
GCCCTCTTCGTCGAGTGTATCGACCTGAACGAATTCGCTCAACTCACCAGCAAAACTCAGGCCGTCATCA
TGGGCAACGCCCGCCGCTCTGACCCAGACTGGCGCTGGTCCGCCGTCCGGATCTTCAGCAAAACCCAGCA
CAAGGTCAACGAAGGTTCGATCTTTGGAGCCTGGAAAGCTTGCCAGACCCTCGCTCTCATGCACGACGCC
GTCGTTCTGCTCCTTGGCCCCGTCAAGAAGTATCAACGCGTCTTCGATGCTCGAGACCGCCCCGCCCACC
TCTACATCCACGCCGGCCAGACGCCCTCTTCCATGAGCCTGTGGTGCCAGACCCACCTCACCCCCGCTGT
CAAGCTCGCGAACGACTACACCGCTTTCGACCAGTCTCAGCATGGCGAGGCCGTCGTCCTCGAGAGAAAG
AAGATGGAACGCCTTTCCATCCCGGATCACCTCATCTCCCTCCACGTTCACCTTAAGACCCATGTCGAAA
CCCAGTTTGGCCCTCTCACCTGCATGCGCCTAACCGGCGAGCCTGGCACCTACGACGACAACACTGACTA
TAACCTCGCCGTCATCAACCTCGAGTACGCGGCTGCCCACGTCCCGACCATGGTCTCGGGCGACGATTCA
CTCCTTGACTTCGAGCCCCCACGCCGCCCAGAGTGGGTCGCCATCGAACCTCTTTTAGCCCTCCGCTTCA
AGAAGGAGCGCGGTCTGTATGCCACCTTCTGCGGCTACTACGCCTCGCGAGTTGGCTGCGTCCGATCTCC
CATCGCCCTCTTCGCTAAGCTCGCCATCGCCGTCGACGACTCATCCATCTCCGACAAGCTCGCCGCATAC
CTCATGGAGTTCGCGGTCGGTCACTCTCTCGGCGACTCTCTTTGGTCCGCCCTCCCCCTGTCCGCCGTCC
CCTTTCAGTCAGCCTGTTTCGATTTCTTCTGCCGCCGCGCTCCCCGCGATCTAAAGCTCGCCCTTCACCT
GGGCGAAGTCCCTGAAACCATCATCCAACGCCTCTCCCACCTCTCCTGGCTATCCCACGCCGTCTACAGC
CTCCTCCCATCTCGCCTTCGCCTCGCCATCCTTCACAGCTCACGCCAGCACCGTTCCCTCCCCGAAGACC
CAGCCGTTTCTTCGCTTCAGGGTGAATTGCTTCAGACGTTCCATGCTCCAATGCCCTCTCTCCCTTCACT
CCCACTCTTCGGCGGTCTATCTCCCGACAACATCCTCACTCCCCACGAGTTCCGCACCGCCCTCTACGAA
AGCTCCGCCTACCCTACTCCTCCCAACTCTCCGACCTCCATGTCAGGAATCCATGCCTCGCAAGTTGGTC
CGCCCCCCGCCAGCGATGATCGCACTGACCGCCAGCCTTCTCTTCCTCTTGCTCCTCGTATTGTGGAGAG
CTCTCTCGCCGTGCCGCACGTCGACGTCCCGTTCCAATGGGCCGTCGCGTCGTACGCCGGAGACTCCGCC
AAGTTCCTCACCGACGACCTCTCAGGATCCTCTCACCTGAGCCGCCTCACCATCGGCTATCGCCACGCCG
AGCTCATCTCCGCCGAGCTCGAGTTCGCCCCCCTTGCCGCCGCCTTCGCCAAGCCCATCTCCGTCACCGC
CGTCTGGACCATAGCCTCCATCGCCCCAGCCACCACCACCGAGCTCCAGTACTACGGTGGCCGACTCCTC
ACCCTCGGAGGCCCCGTCCTCATGGGCTCCGTCACCCGCATCCCAGCCGACCTCACCCGCCTCAACCCCG
TCATCAAGACCGCCGTGGGCTTCACTGACTGCCCCCGCTTCACCTACTCCGTCTATGCCAACGGCGGGTC
CGCCAACACTCCTCTCATCACCGTCATGGTGCGAGGAGTTATCCGCCTCTCCGGCCCTTCGGGCAACACC
GTCACCGCCACCTAAGCCCTCTCACCGGTTTCAACAGGAGTTTCTTCCTCGTTCTTCTCCTGACGACCAA
TGAACGTTGCTTATCCCCCCTTCACATCCCTCCGTTTCCCCCTCCGTTTTCCTCTCTGTTCCATTCCCCC
TCTCCCTCCCCGTCTCAGCAATGAGTAAGGTTCCAGGTCGATTCAAAGACCTGATGGGATTTTCCTCGG
Rice grassy stunt virus (RNA 1, Accession Number: N NC_002323.1) (SEQ ID
NO: 436):
ACACAAAGTCCTGGACAACAAAAACAAAAAAACTCTTTCATCAATATTTCGTTTCTCTTAAGTATTAACT
TTAAATATAATTATAAAGATTGTGTATTCTTCAACGACAGAGGAGTTCTCTATCTACTTTATAACAGTTT
TATTAAAGTTTGTTCTTGCGATAGTATGGGTTACTATCACTCCAAGACTGATAATCCAAAATTGATAACT
ACAAAAATAAGGAAGTACAAAGTATTCTCAATTCCTGTTAAAACTCAGGTTATCATCATTACTGGATCGA
CTCTCTCATTAGACTTCTTTACACTACAAACATGGATACACCTCCAAGAGGGTTTTATCTTAGAAATGGG
TGTTAGATCTACAAATGGTGTGCTGAAAATAGTTAACACTATTTGCCAAGAGAATGGGAAGATAGAGCGT
GATAGGTGGGATTGGTACGGTTGTGCGGATAGTGGTTTGCGTAAGGTTCATTATGATGAAGGGATAGCTA
GATCTGAGAGAACAAGCATAAGGGTTGATATTCGAGGTACCTTATTTGTATTGACTGTAGATGGGCACAT
ACTTGGGGTGTATGATGTTAATAGCTGTATCAATGCCATAAATATTGGTTTGGAAGTTTTGCCAAATTCA
GATAACACGCTGGATTTTGATTTAATATATCACTAGGAAAATACTTATATTAAAGGTAGATATTAATTAA
ATATCGGATATGGGCCGAAGCCCATATATCCAATCAAATGTCCAATATTCTCTAGCATAATCCAAACACA
CAAACTAGAACATGTATGACCTACCTCTACCCCTCCTTCCTCTCCCTCTTGAAGAAGGCGGGTTATAAGT
AGGAAACTGTGAATCAGGCACATCATACATGAATTGTAGAATCCTTTTGTAGTGCATTGAACTCGCTGGC
AGTTTCTGTCGACTTTCACCTTTAATTATATTCATAGTTAATCTCAAATCATCTGTTCCCATGAATGTAT
CCATTTTCCTAACTGAAGATAAGAACATTTTATGAAAGAGAGAAACATTAACTGCCTCTTTCTCCATTTG
GATTTCGTCTTGCTCCTCAGCAAGATCTCTAGCCAACTCATACAGGTGTTCCAAGTCTTCATCTTTTATT
GTCATATCAATAGTTTTATATGCTTGGCTAATCCTGGTTAATAGTGACTCCATACTTTCCAACTCTTCAC
AAACTTCCTTGTCTTCTTGAATACTCTCAGGATAATCATGAGCTAACCTATCTCTTGCTGCCTTGCTTAG
CTTAGATAGTTGAACTATCTTTTGGTAGCCTAATGATGATTCAAAAAGTTCTCTGCACCAACTCTTCAGT
CTTTTCTCATCAACTAGATCTGGAAACTGACCCAAATTCATCTGTGTGAATAAACTAGTGGGTGCTCTCT
GGTCTCTCCACAATATCCAGTCTTTAAGCCAATCATCCATTTTGAGTCTTTTTATCATATTCACATTCTG
CTGTGACTGTAGCTCACTAGTGATCACATCTTTCTTTGAAAGATGAACAGTCAACACTGTTGTGTAAGGT
GCTCTCTCACCAGTGCACTCTTGAAGCAATCTTATAGAGTGATCAGTTATGTCAATACAGAATGAGTCTG
ACAAAAATGGCTGGTGAATTATCAACTTGGGATCTAGAACTATTGGACATCCATCTCTATCACTCATTTG
TACCCTTCGAAATTCAAACATCCTCCCAAGCATTTCACAGTCTCTGTTACCATATGCCATAGTGTAGTGG
GAATTTCCCACTCGATGTTCTCTTGACCATTCCTTCAATGATTGTATAGTATCTGATAGGTGCATTGCAC
TAGATAGACTAACACTTTTGATGTAAGACTCCATATTTTGATCAGAGTTTACTTCAATCTGAACTGCTAC
ATCATGTAGATAACCTCTCCAAACACCTGGTCCGAAGTACTTCTTTTCCTCCCTGTTATATGATTGCTTT
TGGACGTAGCCACCTAGTAGACCTAGATTACCAATTCTTATCTTCTCCATAATGTCTCTCCTACAGTATT
TAGCTTCATCCCTCAGTTTCATTAGGTCATAACTACTCTTAACAATCCTGTGACCAATCATTGTCAACCA
GTTCCTCGTTGGATCATTAGCTGCTTCTGCTTTTAGTAATTCTAAGCTTAGCAGCATTTTTTGTGTTGGT
TTTCTTTTGTTATACTGTTGATATGCATCCTCTAGAACCCTATCACAGTATATGTACTGACAATATGCTC
TTCTAGCAGAAGCACTGAGACTATTTATAGTGAGATCTTCAAAGTTTTTCTCCAGCTCCTCATATCCCAT
ACCACTGTCAAGCAACTCTTTCTCCACTAATTGCCCCATTCTTATTAAGGACCTGAAACCACCAAGAGAA
AGGTTTTGATCAAACTCGCCAAGATGATGTTCAACCAAATTCACTGCATCCTGAGTGTTGTAGTCTCCAG
AGAACTTCAGGTCAGGATCTGTTCTCAAGAACATTTGTATTATAGCCAGCTTGTTCCTTTTGGAACCTAA
CATAGATGTTGAGTATTCTAGATCCTTATTATCAACTATGAGATCTGTCATTGCAACTAGCTTCTCCTCA
TATTTTAAAGGTGATTGGTTTAACATTGTTAAGTTAGATAGTAGAGATTTATAATCCTCAGTTTTTTCTT
TCTTTATCACATCTGTAAAACCTCCAGAGAAAACTATTCCATTGGAGAAATTATTTCTGATAAGTGTCAT
TAGGTTGACGTTTCCTGAGGAAGCCTTGCCCATAGTTCCTACAAAATGCAGAACTCTCCCCTTCGTGCTC
ACTCTAGATAGGTAGTTATTAAGCTGAATGTAGCTAACAAATGGTGATCCTACTAAGGTGTCTCCGATTG
TGTCTCTGAGCCAGAGCCAGGTCTCTTTGTATTTTTTCCAAACTATCTTTAATGTTTTGGGGTGTGCTGG
TACATCCTTTTCTCCGAACCATATGAACTTTGCAACAGAATACACTGAGAATGTTGAACTCTGTTCTGTT
CCAGTCAATTGAATCTGTGATCTCACCCTTCTCCTTTGATTGATTCCACTCCTAGCCATATTGAGATTTA
GGCTGGAGAGATTGGATTCTATTTCTAAATAATCCGTCTCTTCTGGGAACAATGACTGTATCTCTTTGTA
TGATTCTTGTATTTGTCTTCTATGTTCATCAGACATACTGCTAGACTCTTGTCTTCTAACTAATAAGTAA
TTTGGATTTAGCATGAAGTACAGATTCTCAGAATTTGTCAGGCACTTAAAGGTGTGACATAATTTAAAGC
TTGCTTCAGGGTCTCTGCTTATATACACGTGTATGTTAATTCCGAATCCTTTGGACAATTTATGCATTAA
CTTATTTTCGTCAATGAACCAGTCATTCAGTTTAGTATCATCAAGAGTCAATCCAAACTTTTCAGACAAC
AGCCTCTCTGATTGTTCCATGGTTAGGTCAGTTAAAACTGAAACCATCTTTATAACACCCTCTCTCAGTC
CTTCTACTGAATAAAAATCATCACTGGGCTCTTCTGTTAAAGATTGGACGCCAGGAATCTGAGCTTCTTT
CTGGCCAATCTTACTTACCACATTGGAGTTGCTGTTTAGTAATTCTCTGAAAATAGAGGTCTTTCTCTTC
TCATCTGTTTCTACACCAGCAGACATGCTGAACAATACATTTCTAGATATAAAATACACTGAGGATGCAA
CTCTTCTTCCAAGAGTATTTGTCTTTGCTAAGCTTTGCATAACACCTGGGCTTCTCATCTTGATAGCAAT
TTTCTGCTGCATTTCTTCTGCATTCTTAGCATGGAAAAATAGTATTCTAGGATTTTGCTCGATAGAATCA
AAGATATCATCTGTTAAGTGCATCCTATCACACATCTTCATCCATTTGGTCTTGTTGCCGAATCCAACAG
TTGTAGTCCTAGAGAGTACTCCTAGATTAGCAATATCAGGTGTCATCTTCCTCTTTGAATTTTCAGTATT
GAATTCCAGATTTAGCATGTCTGCATATTTCACTGATAAGAATGACTGCTTGCATGTTTTCCATAGATTA
TATCCAAACCCCATCAACCCAGATGCCATTGGGTGGTCCATTAGAAAGTATCCAAGAGCTGGATCTTTTG
ACAACTTAATCATCGAACAGTAGCTGCCCCATAGAGGTGATACTGAAGACCCATACATCCTATAGTGTAA
CATTGCTTGAGCAACTTGAGTTACGAAAGTGTGATAGAACGTCCCTCCACCTTCCAATATATCCTTAAGA
GTGTTTGACATCTCCTCTTGACTAGCGATCAAGGTTTCTTGCTCAGAGACATTCAGTGCAGCATTCACCC
ATCTAATTGTTGGTCTATGGGTGTCTCCTGCAAAGAAAAACTCAATATTAAATTCCATCATAAATATTGT
TCCGGTTGTTGATTTTATAGATTTGTAGATACCTAACATATCCCCATAGTATTCTTTCAGGGAGAATGCT
CTATCTACCAACAGAAGCATTGCAAATGTTTGCCTGTCATTCATAGATTTAGTTGAGAATGATATCATCA
TTGAGCTATCATCTGATGACTCCATGCAATCTATAATAACATTAGACTCATTATCTGGTTGTATTATCCT
AGCCATCTGTGGGAGTTGTTTCTTTTGCCTCTCTGCCAAATCCTCTAGGAATATAGCATGAAACAGAGAG
CTGATATAATGCAGTATACCTTGCATAAATCCTGATTCTGTTTCTATATAAGTCATACCTCTTGTCATCC
AGGGAGCAACCTCTCTTCCTTTAAAAACCTCATGAACTTTCTTGACCTTTTCATCAGTAGTATTTAGTAC
ATCATTTGCACAAAAGAGTCTAAGTAAGTCATCACCCAAGAATAATCTTTTGTGAAACCATAATTGTAAT
GCCCTAACTATGAAGCCGTGCCAGAATTTTGGTAGAATCCTAACTAATATGGTTATAAACTTTGAGACAT
GGTGACCTTGATTCCATTTTGATGCATCATCACTGGTACACACAGTAAAGTAGCTATCACCAAATTCCTT
TCTTGCTGCAATATTGTGTTTATTTGGAATTTGAAATTTGTTCTTAGGATGGGTCATAGTCTCACTAGGG
ACGACTGATAATATAGCTCTGGCAAGATCTTCAACACATTTTTGTACAATCCTCTCATATATATTTAAGA
CATAAATCTCCCTAAGCCCTCCATGCTGGTTCTTCCTGAAAATACACACATGCAGGCAAGCATTCTTTTC
AACCTCCTCCAGAGACTCTTTGAGAAGATCAACAACTAACCTATACTTTTCATTAGGATCCTTTTTAGTT
AAGATAGTTTGTATTTTTTCTATAACTTTCGACCTACCATAGTTTCTCCTGTTAGATTCTGATTTAGGTA
GATCTTCGTTAACGGTCTGCGGTCTACTTCTTTTATTTTCATTAGGTCTGTACTCATAGTACTCAGCCGA
AAAATTGGATGATGCTTTTAGGGTCACAAAAGACTCTAAAAACTCATGTGACAGATACTCTAGACATAAA
GTGCTCAGGTAATCCTTAGGATCACTAACTCCTGTCTCGCTTTTCAATCTTCCCAGAAAACTATCACACA
TCCTTTTAACCAGAGATATAGAATACATGTGGGTACTACACTGATCAACTGGAGGGTCTTCTAATCCCAA
ATACTTCTTATCTTCACCTCTGGGCAGCTTGTCCTCATACCCTAATATCTTAGATATGAGTTGCCCTGAT
GCATTATCTTCTGGATCCTCATCTTTGTTCTTGAGATACCCTAAATACATGCTACTTAGCATTACATCAT
GATTTGGAAAATTGGACAGTGAGCCATTTTCAGTTACAAAGGGATTTTTTATGTTATACCATCTCCTCAT
TGGTCCACTGTTGTCCAATCTAATGGGAGTCTCTGTGTAGCATTCCATCAATTTAATGGCAGACTTTATG
TAGAATACTTCCAATCTAGATCTTGGTATTGTTGATAGTTTTTCAAACATCTTATGAGGTTTAGGCCAGT
TAGGAGTCTCCACAAATGCCTCCATATGTATGAATCTTGTACTAGTGATGACTTCCTCAGTCTGGTGCTT
ATCATTTAGGAGTACCAATAAACAGTTCGCCCACATCTTGAGATAATCAGAGTTGAAATCTTCATCTGGT
ATACTGGAGATACCAATATTTGGTGGGATATTATATTGCTCTCTCCAGAAAGCATATAAACTCAACATTA
GAGATTCACATCTAGTCCAATTGACCAGTTTAGAATAGTTCACTGATATGAAATCAGTGTAGAGGAACCT
ATCTCCTAGTTTTGATACTTTCTTGAAAGTAGTGTTTATAATTTTGCTTAACTCCTGATCCTCTCTAAAA
AGTAAAGAAAAGAAAACTTTACCATCACTCCCAGTTGATTTGATGAGAACGTACACTTGGAAATCCCTCA
ATCTTTTCACAATAAACTCTCTTGGTTGACAGTTCTGCTTGACAGAAATTGATAGTTCAACAGCCAAATC
TGATACAAACTTAGTGAATAGGTATGCCTTGCTCTTGAGATATGTGTCTAAGGACTCCAACAGTCTAGAT
TGAGAAGAACAACCATGAATCTTAAGTGAATCACTTATTAGGTCTAACACACTATTATCTAATTCTTGAT
CATGAGGTGTAAACAATTGGAGACACTCTTCATTTATAAACCTCTCAATGTCATCAGTGGATGTGAATAA
GGAGAAGGGTTTCTTTGACTCATTTCTGTAAGCCAGTACCTCAGGATCCTTACTATATTTCTTACCATTT
ATTCCTATCTTTGCTAGATCTATCCTATCATCCATGTCAAACACCATCGAAATTCTGTTGAATTTATTCC
TAATCTTTTTGAGATCATCCTCCATTTGAGTGGAAAGAGTTGGTTCTTCCATTGCAAGAGAGAAATCCGA
TTTACCATCTTCAATCTCATATAGATAATGCATGAAACCACAAATGCCTTGTTTCCAAGCTTCTTCTGTT
GAACTCATTGAAGAAGTACTAATGATTTCATCAACTACATTTCTGACCTCCTCATGTGTGTTGCTTACTC
CCACAACTCGCACAATCTTGGGAACTAACATTGGAAGCTGAACAGATGCCTCGTTGGATGTTCTGTAAGC
TTCTTCATTTTTTATAAAGTTGGATTCATATTCCATTTTCCTTGATTGCATCATCAATATGGATTCATTT
CTTATTTCATCTCTATAGGCTCTTATATTTACATCATTAAGATGCTTCAGTTTCTCCATCTTCCTCATGG
ATTTATTGGAGACGTAAGTATCAAGTTTGTGTAAGTAATCATAATCTTCAGATTCTAGTGTCCCAACAGC
TTTAGTATAATGAGCCATGGTATATGGTTTAATAAATTTACTGGGATCCAATTCTCCATCTTCCTTATGT
ATTCTTATTCCTTCTATAATCTTCTTTATAGACGAGATCTCCATTTTCATCGCTTGGTCAGCCTTTATGT
CATATTCTAAATTTTGCTCAATTTGTAGGGCTATCTGTCTTGCTAGTTTATATCTATAGATCAATTCATC
CATTGTCTCTGTGGGGAGATTCATCAGGTTAGTTTGAACGCCATTTTGACACACTACGATTATATAGTAA
TCTATGCTAATCTTGAAGTGGTCTCTCCTATTGTGAATAGCATCTCTGTACTTGAGAGTTTTATCTTCCC
AACCTCTGCTTCTTACATCTGGTCTCATATTAGTGTTTCTAGTAGTGAACTCAATAACACTGTAATGTTT
TTCCCCATGTTTTATTATCATGTCAGGGGTCTTATTATTGTCTGGATCTCCAGGTATAAAGAGACCAGCA
TCAGTGAAAGAGACATCTAGATCATCACCAAACAGGGCAAAAGTGAAGTCATGGACAATGTTTTTCACTG
TGCTTATTTTGCATGAGTAAGCTCTGTTGTCGGGTATTGAAGGAAAGTCATGATACTTCCTATTACCAAA
TCTATTTTCAAAGCTGATCACAATTTCAGTTTCATCAGGAGAAACAATCTCACTAGTTTCTGGCACTTTC
AACCTTGGATGCATCTCATACAATCCATACATAGATTCATCATAACCACTATGTTCAGGATTTGTTAACT
TCTGTATATCATCATCGTAACTCGTGAACAGGAATTCTGCTGTTTTCCTGCTGAAGCTAAGAGTGGGGAA
ATCCTTATCATATTGGTCATCTCTGAGAACTGTCACTGGCAAACCACTTTTTACAGCACCCCATAGGTTT
CCTTCAGAGTCCAATAAAAAATGTTTCTGCTTCTTAGTAAGTTCAGGATTCTGACCCCAGTATTTATAAA
TTTTTGGTTTTAATATCGTCCCAACATTGACCATATCATTATCCACTAGGAGTATAGTGAGCAGATTTTC
CAACTCTTTTGATAGGAAACAAAGTGATAACAATTTATTCTTGTTCAAAAACGGTTCATAGTCCACTTCT
CTGCGCTGTGGAAATATTGTTTTACACTTCTCAATCATTTTCAGTTTGTTACTATACCAATTACTAGGTT
GTACAAATGACTGTGTTAGTTGTCTTATTAGTGACTCCAAGTCATGCACTTTTTCTAACACCTGATAATT
CTGATCAACTTCAAGTAGTCCTGAAATCTTTAGGAAAAACCACTTGTTCGTTGAGCCATCATAAATAAGC
TCTAATAAGCCATTCCCTGGCCCTACACACTTGAAACCACCTTCTAAACTATACAAGTTCTCATGATATG
ACAACAAGCGAACTTCTATAGTCATTCCCAAATTGAGTGACAACATTGCTACCTCTTGCTGCCTAGAATA
CTTCTTCAGTCTTACAATGGAAGAAAATAAGTTGCAGTTAAATTGAGGCACTTGCTGATGTAAATTACTT
TCAGCAAGACTAGCAAGAGAATTGTACCACTGGCCTCTCTCAGTGAAAACATCTCCCAATGGTTTTGTCT
CAACCTTCAGCTCAATCATGCTAGGTAGATCTATGTCATCATCTAAACTACCTAGATATCCACCTAATAC
TGAAGATAGCTCAAAGTAGTCATATGTTGGGTCATCTATGGCTTCATAGTGCCTACTTTCCAGTTTCATG
TGAATCATCAACTTACTCCTATCACCGAATGTTTTACAATGGCTGTCCCATGTTTCATCATGAATACATA
TACATATGTCTAGACATATTGAAACATGAATGATTGAATAATAAGTAGCCATATAAGAATCATTTGGATC
CAGTTCTCGTAACAACTCCTTCAACTCAGAAGCTGTCCATATACTCATGGCATAGTACTGATTCCTCAGC
TTGTTCATCACCTTGATGTAATCCTTACTCTCCACTCTTAAACATAAACATAAGGCATTGAAGAAACATT
TTAGATTTGGAGAGGGAGTCGGTATTGTTTCAGCACCTTTATAGAAGCAATCCACCAGGCTACCGTTGAT
ATCATATTCGACATCATTGTACTTAAACCTCTCTACACCTACTATTTCATTGTTCATATTATGTAAGTAG
GAAATATTAGAGAATTGACAGTTTGTATTCATGTTAGCTAGTGAGAGGTATACAACAATGACAAAACCAA
CCAGATGATATGGTGTGGACAATATTCTAGAGATATTATTATAATGTAATTAAGAATAAGAAATTAACTA
ATAAATAAATGCAATAATTAATAAAATTATATTACTGAAAAAGTATTCCCTGAATATTATGCTATTTGTT
CGTTTTTCTAATTTTGTCCAGACTTTGTGT
Oat chlorotic stunt virus (genomic DNA, Accession Number: NC_003633.1) (SEQ ID
NO: 437):
TTAAATCGTCCCGATTTAGCAAGCCATGGCTCTTTATCCGTCTCAAGATGTCTTGGCCCTCACTCAGTGG
GGTGCCAAATGGCTCAAGTTCGGTTTCAACATGGTTGTCGGTAACACACCCGAGGCGCAGTTTGCCCAAG
GAACTCCTCACGGCGTTTGATACATGTAATGTGGCTCCCGAAGCACTTTTGGTGTTGCGGTCCACATCGT
TGATGATACTTGAGGAAACCTGTGTGGTTGTGGGTGCGGCAGAGATGCCCACCGCTGAGGATAACTCTGG
TCGGGAGTTGTTCATTGGCTCCAACGGTGACCCGATGGAAAGGAAAACCCGCACGGCGCACCATGCCATC
AAGAAGACCGTGCGCATCAAGAAAGGGCATCGCACAACCTTCGCCATGACTGTGGCGAACGGGGCGTATG
TCAAGTTTGGTGCCCGTCCATTGACGGAGGCAAATGTGCTGGTCGTGCGTAAATGGATCGTTAAGCTTAT
TGCTGACGAGTACAAGGATTTGCGGGTGTGCGACCAGGCACTGGTTATAGACCGTGCCACGTTCCTATCA
TTCATTCCTACCATGGCGTGGAATAACTATAAGTTTATCTTCCACGGTAAGAATGCCGTCACAGATCGCG
TGGCGGGAGAGAACCTGTTTTCCCGGATCGCCCAATGGGCGAATCCAGGGAAATAGGGGTGCCCAGTAGT
CGTCACAGGGCAGGGATGCGTCATTAGCCGCGCTCCCGATTGTGCCCAGTTGCGTGTGAAGAGGCTATTG
GGAGTCACAAAGAACCGGACATGTATGCGTGTGTCTGGGGTTTCCCCTAACATCCAAATCATCCCGTTCA
ATAACGACATCACGACTCTGGAGAGGGCCATAAAAGAGAGGGTGTTCTTTGTCAAAAACCTCGACAAGGG
ATCGCCCACCAAATTTGTCTCCCCTCCCAGACCTGCGCCTGGTGTGTTTGCCCAGAGATTGTCAAATACG
TTGGGACTGTTAGTACCTTTTCTTCCCTCGACCGCTCCGATGTCACATCAGCAATTTGTTGATAGCACGC
CGAGCCGCAAGAGGAAGGTGTACCAACAGGCTCTCGAGGATATCAGTTGTCATGGGCTGAACCTCGAGAC
AGACAGCAAGGTGAAGGTGTTTGTGAAATACGAGAAAACCGACCATACATCCAAGGCAGATCCAGTGCCG
CGGGTGATTTCTCCCCGTGATCCTAAGTACAACCTGGCGCTCGGCAGGTATCTTAGGCCCATGGAAGAAC
GAATATTCAAGGCGCTTGGCAAATTATTCGGCCATCGCACCGTCATGAAAGGTATGGATACCGATGTGAC
GGCTAGGGTGATCCAGGAGAAATGGAACATGTTCAACAAGCCTGTAGCTATAGGCTTGGATGCGTCTAGA
TTTGACCAGCATGTTTCACTGGAAGCGCTTGAATTTGAGCATTCAGTGTACCTCAAGTGTGTGCGCAGGA
TGGTGGACAAGCGTAAGCTTGGCAACATCCTGCGACATCAACTTCTAAACAAATGTTACGGCAACACGCC
TGATGGCGCGGTGTCGTACACCATTGAGGGTACACGAATGAGTGGGGACATGAACACATCCCTAGGTAAT
TGCGTTTTGATGTGTATGATGATCCACGCTTATGGTTTGCATAAGAGTGTCAACATACAACTGGCGAACA
ATGGGGATGATTGTGTCGTGTTTCTGGAGCAATCCGATTTGGCCACCTTCTCAGAAGGCTTGTTTGAATG
GTTCCTAGAAATGGGATTCAACATGGCCATCGAGGAGCCCTCCTACGAACTGGAGCATATCGAGTTTTGT
CAGTGCAGGCCGGTGTTTGATGGTGTTAAATACACCATGTGCCGGAACCCCCGCACTGCCATTGCTAAAG
ATAGCGTGTATCTGAAACACGTTGATCAGTTCGTCACATATTCTAGCTGGCTGAATGCCGTGGGGACAGG
TGGGTTGGCGCTGGCGGGTGGTTTGCCCATCTTTGATGCGTTTTACACCTGTTATAAGCGTAACAGCAAC
TCCCACTGGTTCAGTGGCCGGAAAGGAAGGTTGAAAACCCTGTCAAGTGTTGATGATTCGCTCCCCTGGT
TCATGCGCGAGCTTGGACTGAAAGGGAAAAGGTCGTCAGCCGAGCCGTTACCAGCGTCTCGTGCCAGCTT
TTACCTCGCATGGGGGGTCACCCCCTGTGAGCAGTTGGAGCTTGAGAAATATTACAAATCGTTCAAACTG
GACACGTCCACATTGCTTGAGGAGCATTTGTGGCAGCCTCGCGGGGTGTTTCCCGATGAGGATTGAGCAC
ATTGTGGAAGAAGGTCACCACATTAAATCCACCCTTTACCATGGGGCTTGTCGTTAAATTGCCAAAACCA
ATTTGATGGGCTGATATAGATGCCAAGAGACTGCACGGCATACTACGTCGACAAGTGAACAGTCCCGTTG
TGTTGCGGGATCCCATACTAACAATCGTTCCTATGACTCTGAACTTACGTAAGGTACCAGCATACCTACC
AGGCAAAGTTGACGGAGCGCTCACTAATTTGGTGCACGCCGCCGTTGACCACGTGGTTCCTGGATTAGGC
AAAGCAGAGAAAGCTGCGGCAGTGTACAATATCAAACAGGTCGTTAAGAAACTCGGTACATACACCGAGC
AAGGCGTCAAGAAAATCGCAAAGAAAACGTTGGGTGAGTTGGGTTATCTCAATTACACCCCATCGTCACA
TCTTGGCATGGCTATAACCGGTCGAGGTACAAAACAAATCAATATGTCTCGCAGCACAAATGCTGGCGGT
TTTGCCCTCGGTGGCACCACCGCAGCGCCAGTGTCCATATCCCGCAATATCAACCGCCGCTCCAAGCCCA
GCATTAAGATGATGGGTGATGCGGTGGTTATCTCGCACAGTGAAATGTTGGGTGCCATTAATTCTGGCAC
CCCTTCATCGAATGTCACCGCTTTCCGTTGCACTGGCTACCGAGCTAATCCTGGGATGTCAACTATCTTC
CCTTGGCTGTCTGCAACTGCCGTTAATTACGAGAAGTACAAATTTCGTAGGCTCAGCTTCACTCTTGTCC
CGTTGGTTTCTACCAATTATAGCGGAAGAATAGGAGTTGGGTTTGATTACGATTCGTCTGACCTCGTACC
TGGCAACAGACAGGAATTTTATGCTCTCTCAAACCATTGTGAGAATATGCCGTGGCAGGAAAGCACTGTG
GAGATTAAATGTGATAATGCGTACCGATTCACTGGCACTCATGTTGCAGCGGACAATAAGCTGATTGACC
TCGGCCAAGTCGTGGTGATGTCTGATTCTGTGTCCAATGGTGGCACTATTTCCGCTGCGTTGCCGCTTTT
CGACCTGATAGTCAATTATACTGTGGAGCTGATTGAACCTCAACAAGCCTTGTTTTCATCCCAACTGTAT
AGTGGTTCTACCACTTTTACCTCTGGGATACCACTTGGCACAGGTGCTGATACCACAACTGTGGTCGGTC
CCACTGTTGTAAACTCCACAACTGTCACGAACTGTGTGGTCACCTTCAAGCTGCCCGCTGGGGTGTTTGA
GGTGTCATATTTCATTGCCTGGTCCACAGGAACCGCTGCTGTTGTGCCCACTGTTCCCACTACTGGGGCT
GGGTCCAAGTTGTCGAACACATCCACTGGCTCCAACTCTTATGGGGTCTGTTTCATAAACAGCCCCGTTG
AGTGTGATCTGTTGCTTACGGCAACGGTACTGCTTATAATTCCAACCTTACCAAGTTCAACGTGTGTGTT
TCACGCACCTGCTCGCAGGTGTACAACGCCTATGTGTCATAGGTTGCTAACGTCTCTTGCTGGCTGAGAC
ATTAATAAATGGATCCAGTAGGTCGTCAAAGCAAACCAACAAGGCTTGCCGGGGTGGATGCGTAGCGCAG
CATGTCTGTGTTGGTACGGCCACACCCGGAGGGACCTCACCTTGTAGGCAGGAGTACACGACTGTTTTCT
TTATTGTTGCTCACAATGGAAAATACAAAAATAGGCTTATCACCATGATGGACACGCCAAAATATTCCAG
CCCTGGCGAGTCGCGGTCGCAATCCGCAGTTTATTAAAACCCTTCGGGGTGGGC
Rice stripe virus (RNA 1, Accession Number: NC_003755.1) (SEQ ID NO: 438):
ACACATAGTCAGAGGAAAAAATAATTTTGATTTTGTTTTCCACAAAAGAATTGAAGGATGACGACACCAC
CTCTCGTTATACCCTTGCATGTTCATGGCAGGTCTTATGAACTGTTGGCGGGGTATCATGAAGTTGATTG
GCAGGAGATAGAAGAGTTGGAAGAAACAGATGTCAGAGGAGATGGATTTTGTCTTTATCATTCCATACTA
TATAGTATGGGCCTGAGCAAGGAGAACTCTCGCACCACTGAATTTATGATAAAGCTACGATCGAATCCAG
CCATCTGCCAGCTGGATCAAGAAATGCAACTGAGCCTTATGAAGCAGCTTGATCCAAATGACTCATCAGC
CTGGGGTGAAGATATAGCAATTGGGTTTATAGCTATAATATTGAGAATTAAGATAATTGCTTACCAGACA
GTTGATGGGAAGTTGTTTAAGACTATTTATGGTGCTGAGTTTGAGAGTACTATTAGAATTAGGAACTATG
GGAATTACCACTTCAAGTCACTTGAGACAGATTTTGATCATAAAGTAAAGCTCAGATCAAAAATTGAAGA
ATTCTTGAGAATGCCAGTGGAAGACTGTGAATCCATATCCTTGTGGCATGCATCTGTTTACAAGCCTATA
GTATCTGATAGCCTTTCTGGACACAAGAGCTTTAGTAATGTGGATGAATTGATAGGTAGCATAATATCCA
GCATGTATAAGATCATGGACAATGGTGATCAATGTTTTCTTTGGAGTGCAATGAGAATGGTAGCCAGACC
CTCTGAAAAACTATATGCCCTTGCAGTGTTTTTGGGATTCAATCTTAAGTTCTATCATGTGAGGAAAAGA
GCTGAAAAATTGACGGCAAAACTTGAGAGTGATCATACTAATTTGGGAGTGAAGCTGATTGAGGTATATG
AAGTTTCTGAGCCAACCAGATCTACCTGGGTCCTGAAACCAGGAGGGAGCAGAATAACTGAAACAAGAAA
TTTTGTGATTGAGGAGATAATAGATAACAGGCGCTCTCTGGAGAGCTTATTTGTGTCAAGCAGTGAGTAT
CCTGCAGAGTTATGTTCCCAGAAACTTAGTGCCATCAAAGACAGAATAGCACTAATGTTTGGCTTTATCA
ACAGAACCCCTGAAAACAGTGGGAGGGAACTCTACATAAACACATACTATCTGAAGAGGATCTTACAGGT
GGAAAGAAATGTAATTAGAGATTCTTTAAGATCACAGCCTGCTGTGGGGATGATCCAGATAATCAGATTA
CCAACAGCATTTGGTACATACAACCCGGAAGTGGGCACTCTGTTGTTAGCCCAAACTGGACTAATCTATA
GACTTGGCACCACAACTAGAGTGCAGATGGAGGTCAGGAGATCTCCCTCTGTTATTTCAAGATCTCATAA
GATCACTAGTTTTCCGGAGACACAAAAACATAACAACAATTTGTATGATTATGCACCCAGAACACAGGAG
ACATTTTATCACCCAAATGCTGAGATCTATGAGGCTGTTGATGTAAAGACTCCTAGTGTTATTACAGAGA
TTGTTGATAATCATATAGTGATAAAATTGAACACTGATGATAAGGGTTGGTCAGTCAGTGATTCGATAAA
GCAAGATTTTGTATATCGGAAGAGACTAATGGATGCAAAGAATATTGTTCATGACTTTGTTTTTGATATC
TTATCAACTGAGACTGACAAGAGCTTTAAGGGTGCTGACTTATCTATAGGAGGAATCTCAGATAACTGGT
CACCAGATGTCATTATATCAAGAGAAAGTGATCCACAGTATGAAGATATCGTTGTCTATGAGTTCACAAC
AAGGTCCACTGAGTCTATAGAATCTCTACTAAGATCAGTAGAGGTTAAAAGCTTACGATATAAAGAAGCA
ATTCAGGAAAGAGCCATCACATTAAAGAAGAGAATATCGTATTACACAATATGTGTCAGTCTAGATGCTG
TAGCCACAAATCTGCTATCACTTCCTGCTGATGTCTGCAGAGAACTAATAATTCGTTTAAGAGTTGCTAA
TCAGGTGAAGATCCAGCTAGCTGATAACGATATCAATCTTGACTCTGCCACTTTGCTAGCACCTGACATT
TACAGAATAAAGGAAATGTTTAGGGAAAGTTTCCCAAATAATAAATTTATACATCCTATTACTAAGGAAA
TGTATGAGCATTTTGTCAATCCAATGATTTCAGGAGAAAAAGACTATGTTGCCAATTTAAAGAGCATAAT
AGACAAAGAGACCAGAGATGAGCAGAGAAAGAATTTAGAGAGTCTGAAAGTTGTGGATGGGAAAAAGTAC
ACAGAGAGAAAAGCAGAAACTGCTCTGAATGAGATGTCACAAGCAGAAGAGCATTATAGAAGCTATTTTG
AAAATGACAATTTTAGGTCCACACTAAAAGCTCCAGTCCAACTTCCCTTAATCATACCGGATGTGTCAAG
TCAGGACAATCAATTCTCAAACAAGGAACTATCTGATAGGATACGGAAGAAGCCGATCGACCACCCTATT
TACAACATCTGGGATCAAGCAGTTAATAAGAGAAATTGCTCGATTGCACTCGGCCATTTGGACGAGCTAG
AAATATCTATGCTAGAAGGACAAGTGGCTAAGAAAGTGGAGGAATCTTATAAGAAAGATAGGAGTCAGTA
CAACAGGACAACTCTGCTAACTAATATGAAGGAGGACATCTACTTGGCTGAAAGGGGGATAAATGCTAAG
AAGAGGTTGGAAGAACCAGATGTGAAATTTTATCGAGATCAGTCTAAGAGGCCTTTTCATCCTTTTGTGA
GTGAAACCAGAGACATAGAGCAGTTCACTCAGAAAGAGTGCCTGGAACTCAATGAAGAGTCAGGACACTG
CTCGCTGATAAATGTAGAGGATCTAGTGTTATCTGCTCTAGAGTTGCATGAGGTAGGTGATTTAGAACAC
TTATGGAACAACATAAAAGCTCATTCTAAAACAAAGTTTGCATTATATGCTAAGTTTATCTCTGATCTTG
CCACCGAGCTAGCCATTTCATTATCCCAGAATTGCAAAGAAGACACCTATGTGGTTAAGAAACTCAGAGA
TTTTAGCTGCTACGTACTCATTAAACCAGTAAACTTAAAGAGTAATGTGTTCTTCTCTTTATACATACCT
TCTAATATTTATAAGTCACACAACACAACTTTCAAGACTCTGATAGGCAGTCCAGAATCAGGGTATATGA
CTGATTTCGTCTCTGCTAATGTGAGCAAGTTAGTGAATTGGGTTAGATGTGAAGCTATGATGCTAGCACA
AAGAGGTTTCTGGCGAGAATTTTATGCTGTGGCCCCTAGCATTGAGGAACAAGATGGAATGGCGGAGCCA
GACTCAGTATGTCAGATGATGAGTTGGACACTCCTCATATTACTAAACGACAAGCATCAGTTAGAAGAGA
TGATCACAGTGTCTAGGTTTGTCCATATGGAAGGCTTTGTAACTTTTCCTGCATGGCCTAAACCTTATAA
AATGTTTGATAAATTATCAGTAACTCCGAGGTCTAGGTTAGAATGTCTAGTCATAAAGAGGCTCATTATG
CTAATGAAGCATTATTCAGAAAATCCCATTAAATTTATGATAGAAGACGAGAAGAAAAAGTGGTTTGGAT
TCAAAAATATGTTCTTGCTTGATTGTAATGGTAAACTTGCTGATTTATCTGATCAGGATCAAATGCTTAA
TCTCTTTTATCTTGGGTATCTAAAGAACAAAGATGAGGAGGTCGAAGACAATGGCATGGGTCAACTATTG
ACTAAAATCCTGGGCTTTGAGAGTGCCATGCCAAAGACAAGAGACTTCTTGGGTATGAAAGATCCTGAGT
ATGGTACAATCAAGAAGCATGAGTTCTCCATAAGCTATGTGAAGGACCTCTGTGATAAATTCTTAGACAG
ATTAAAAAAGACACACGGAATCAAAGATCCAATTACTTATTTGGGCGACAAGATAGCTAAATTCCTTAGC
ACTCAGTTTATTGAGACGATGGCATCTTTGAAGGCATCATCTAACTTCTCAGAGGATTACTATTTATACA
CACCCAGTAGAAGACTAAAAAACCAGGAGCAATCTAGAAGTAAACATGTAATAGACGCCGGTGGGAATAT
ATCTGCTAGTGTCAAAGGTAAGCTGTATCATAGAAGCAAAGTAATTGAGAAGCTCACAACCCTAATTAAA
GACGAAACACCAGGAAAAGAACTGAAAATAGTGGTAGATCTCTTACCGAAGGCTATGGAAGTCCTAAACA
AAAATGAATGTATGCACATTTGTATTTTCAAGAAGAATCAGCATGGAGGCCTTAGAGAAATATATGTTCT
TAATATCTTTGAAAGAATAATGCAGAAGACAGTGGAAGATTTCTCTAGAGCCATTCTAGAATGCTGTCCT
AGTGAGACAATGACATCCCCGAAAAACAAGTTTAGAATACCTGAATTGCACAACATGGAAGCAAGGAAAA
CTCTAAAAAATGAGTATATGACAATATCTACTAGTGATGATGCATCGAAATGGAATCAAGGTCACTATGT
ATCTAAATTCATGTGTATGCTATTGAGGCTCACTCCAACATATTATCATGGCTTCTTAGTTCAGGCTCTT
CAACTATGGCATCATAAGAAGATATTCCTAGGAGACCAGCTGTTGCAATTATTTAATCAAAATGCTATGC
TAAATACCATGGACACAACCCTCATGAAAGTCTTTCAAGCCTACAAAGGGGAGATTCAAGTGCCTTGGAT
GAAGGCAGGTAGATCCTACATAGAGACTGAGACAGGTATGATGCAGGGAATTCTCCACTATACTAGCTCT
CTATTCCATGCTATCTTCTTGGACCAACTGGCTGAAGAGTGTAGAAGAGATATAAATAGAGCAATTAAGA
CAATAAATAATAAAGAAAATGAGAAGGTGTCATGTATAGTGAACAATATGGAAAGTTCTGACGATAGTAG
CTTCATTATTAGTATTCCCAATTTCAAAGAGAATGAAGCAGCACAATTGTACCTGCTCTGTGTGGTTAAC
TCTTGGTTCAGAAAGAAAGAGAAGCTTGGAACTTATCTTGGGATATATAAATCTCCAAAGAGTACAACTC
AGACATTGTTTGTGATGGAATTCAACTCAGAATTCTTCTTTTCTGGTGATGTTCACAGGCCAACTTTTAG
GTGGGTCAATGCAGCAGTGCTAATAGGAGAGCAAGAGACATTGTCTGGTATACAGGAAGAGTTGTCAAAT
ACATTGAAGGATGTAATAGAAGGTGGAGGAACATATGCCCTCACTTTTATAGTGCAAGTTGCTCAAGCTA
TGATACACTATAGAATGCTGGGCAGTAGTGCTTCATCAGTGTGGCCAGCATATGAAACTCTTCTGAAAAA
CTCATATGATCCTGCACTTGGCTTCTTCCTAATGGATAATCCTAAATGTGCTGGCTTGTTGGGATTCAAC
TATAATGTTTGGATTGCCTGTACGACGACACCTTTGGGAGAGAAGTATCATGAGATGATACAAGAAGAAA
TGAAGGCTGAGTCTCAGAGCTTAAAATCAGTAACAGAAGATACAATTAACACGGGATTAGTTTCACGAAC
AACTATGGTGGGCTTTGGAAACAAGAAAAGATGGATGAAACTCATGACCACACTGAATCTGAGTGCAGAT
GTGTATGAAAAGATAGAAGAGGAGCCAAGAGTGTACTTTTTCCACGCAGCAACAGCTGAACAAATAATTC
AGAAAATTGCTATTAAAATGAAGAGTCCCGGTGTGATACAGTCACTGTCTAAAGGAAACATGCTGGCAAG
GAAGATAGCGTCAAGTGTATTCTTCATATCTAGACATATAGTCTTCACAATGTCCGCTTATTATGATGCA
GACCCTGAGACAAGGAAAACATCACTGCTGAAGGAGTTGATTAATAGCTCTAAAATACCTCAGAGACATG
ACTATCTGCAGGAACCGCATACATTGAAGCCAACTAAAGTTGAAGTTGATGAGGACAGCTGGGAATTCAA
GTCAGCAAAAGAGGAATGCGTTAGAGTGCTAAAACAAAGAATCAAAATACACACTGGGAGAGAAGAGAGA
TCTATTAGTCTTTTGTTTGAAAATATGGCTAAGTCAATGATTGGGAGGTGCACGGACCAGTATGATGTTA
GAGAAAATGTTTCCATTCTAGCATGTGCACTGAAAATGAACTATTCTATATTCAAGAAGGATGCTGCACC
CAATAGGTATCTCCTTGATGAGAAGAACCTTGTATACCCACTGATTGGAAAGGAAGTATCTGTTTATGTT
AAGTCTGACAAAGTACATATTGAAATATCTGAGAAGAAAGAAAGGCTATCAACCAAATTATTTAATATAG
ATAAAATGAAGGATATAGAAGAGACTCTCTCACTACTGTTTCCTAGTTATGGAGATTACTTATCCTTGAA
AGAAACAATTGACCAAGTAACTTTCCAATCTGCCATACACAAAGTCAACGAGAGAAGAAGAGTTAGGGCA
GATGTGCACTTAACAGGGACAGAAGGATTTTCTAAGTTGCCAATGTATACAGCAGCTGTCTGGGCCTGGT
TTGATGTGAAGACTATCCCTGCACATGACAGCATTTATAGAACTATCTGGAAAGTCTACAAAGAACAATA
CTCCTGGTTGTCAGATACACTGAAAGAGACAGTGGAGAAGGGACCATTTAAAACAGTACAAGGTGTGGTT
AACTTCATTTCTAGAGCTGGTGTGAGATCGAGAGTCGTCCATCTAGTAGGGTCATTTGGTAAGAATGTCA
GGGGTAGCATAAATCTGGTGACGGCAATAAAAGATAACTTTAGCAACGGACTAGTTTTCAAAGGGAATAT
ATTCGATATCAAGGCAAAGAAAACTAGAGAAAGTTTGGATAACTACTTGTCAATCTGCACCACTCTGTCT
CAGGCACCTATCACTAAGCATGATAAGAACCAGATTTTGCGCTCTCTTTTCGTCAGTGGTCCAAGAATCC
AGTATGTGTCATCACAGTTTGGATCAAGAAGAAACAGGATGTCAATATTACAAGAAGTCGTGGCAGATGA
TCCAACTCTACATTGGCCTGACCAAGACACAAGTCAGAAACAGCTAGAAGACAAATTCAGAGAACTAGCA
CACAAGGAGCTCCCATTTCTAACAGAGAAGGTGTTTCACGATTATCTGGAAAAGATAGAGCAGCTAATGA
AGGAGAACACTCATCTAGGTGGTAGGGATGTTGATGCTAGCAAAACCCCATATGTGCTTGCCAGAGCAAA
TGATATTGAAATACATTGTTATGAGTTGTGGAGAGAGTATGATGAGGATGAAGATGAAGCATACCAGGCT
TATTGCAGTGAAGTGGAGGCTGCTATGGATCAAGAGAAACTTAATGCTCTAATAGAGAGATACCATGTAG
ACCCTAAAGCAAACTGGATTCAAATGTTAATGAATGGTGAGATTGAAACAGTTGAAGAGCTGAACAAGCT
TGACAAGGGGTTTGAGAGCCACAGACTTGCTCTAGTCGAAAGAATTAGGGTGGGGAAACTTGGAATTTTA
GGCAGTTACACCAAGTGTCAACAGAGAATTGAGGAGCTAGATGGTGAAGGTAATAAGACTCATAGATACA
CAGGAGAAGGGATATGGAGAGGTTCATTCGATGATTCCGATGTTTGCATAGTTGTCCAAGACCTGAAGAA
GACAAGAGAGAGTTACTTAAAATGTGTCGTTTTTTCCAAAGTGTCAGATTATAAAGTCTTGATGGGCCAT
CTGAAGACATGGTGCAGGGAACACCATATTAGTAATGATGAGTTTCCTACCTGTACTCAGAAAGAGCTTT
TAAGCTATGGTGTCACCAAGAGTTCAGTTCTATTGTACAAGATGAATGGAATGAAAATGTTGAGGAACAT
GGAAAAAGGTATTCCTCTGTACTGGAATCCTAGCTTGTCAACTAGAAGCCAAACTTATATCAACTGGCTT
GCTGTTGATATCACAGATCATAGCTTACGGCTTAGGAACAGAACTGTTGAGAATGGGAGAGTTGTAAATC
AAACAATCATGGTTGTTCCTCTGTACAAAACTGATGTGCAGATATTCAAAACATCTCCTGTAGATCTTGA
GCAAGATGTGCAGAATGATAGACTTAAGCTATTATCAGTAACGAAAGCTGGGGAGTTGAGATGGCTTCAA
GATTGGATAATGTGGAGATCATCTGCTGTAGACGATTTGAACATACTAAACCAGGTTAGAAGAAATAAGG
CTGCAAGGGATCATTTTAATGCTAAACCAGAGTTCAAAAAATGGATAAAAGAGCTGTGGGACTATGCACT
TGACACCACACTAATCAATAAGAAAGTCTTCATAACTACACAAGGATCAGAGTCACAGAGCACAGTTTCT
TCAGGAGATAGCGACAGTGCAGTGGCACCTTTAACTGATGAGGCAGTGGATGAGATTCATGATCTCTTAG
ACAAAGAGTTAGAAAAGGGCACCTTAAAACAGATCATCCATGATGCAACCATCGATGCCCAGCTTGATAT
CCCTGCTATAGAGAGCTTCCTGGCTGAAGAAATGGAGGTGTTCAAGAGTAGCTTAGCCAAGAGCCACCCT
CTTCTACTAAATTATGTTAGGTACATGATTCAAGAGATAGGTGTGACCAACTTCAGATCATTGATTGATA
GCTTTAATCAGAAAGATCCCTTGAAAAGTGTGTCTCTAAGCATCCTAGACTTGAAAGAAGTGTTCAAGTT
TGTGTACCAGGACATAAATGATGCCTATTTTGTTAAACAGGAAGAAGACCATAAGTTCGATTTCTGAGAA
GTCCTCTTCAACAAAGGGACTGCAGCACAAACACAAGTCCAGACACCATTGAAATCCATACAAATATTTC
ACGTTTTATCCCTTATGACTTAGATTTTCAATAATTAATTATATAAACAAAAACATTTTGTTTTCCTCTG
GACTTTGTGT

| Protein | | SEQ ID | |
|---|---|---|---|
| Name | Accession # | NO. | Sequence |
| HIV | NC_001802.1 | 479 | GGTCTCTCTGGTTAGACCAGATCTGAGCCTGGGAGCTCTCTGGCTAACTAGGGAACCCACTGCTTAAGCC |
| | | | CAATAAAGCTTGCCTTGAGTGCTTCAAGTAGTGTGTGCCCGTCTGTTGTGTGACTCTGGTAACTAGAGATC |
| | | | CCTCAGACCCTTTTAGTCAGTGTGGAAAATCTCTAGCAGTGGCGCCCGAACAGGGACCTGAAAGCGAAAGG |
| | | | GAAACCAGAGGAGCTCTCTCGACGCAGGACTCGGCTTGCTGAAGCGCGCACGGCAAGAGGCGAGGGGCGGC |
| | | | GACTGGTGAGTACGCCAAAAATTTTGACTAGCGGAGGCTAGAAGGAGAGAGATGGGTGCGAGAGCGTCAG |
| | | | TATTAAGCGGGGGAGAATTAGATCGATGGGAAAAAATTCGGTTAAGGCCAGGGGGAAAGAAAAAATATAA |
| | | | ATTAAAACATATAGTATGGGCAAGCAGGGAGCTAGAACGATTCGCAGTTAATCCTGGCCTGTTAGAAACAT |
| | | | CAGAAGGCTGTAGACAAATACTGGGACAGCTACAACCATCCCTTCAGACAGGATCAGAAGAACTTAGATCA |
| | | | TTATATAATACAGTAGCAACCCTCTATTGTGTGCATCAAAGGATAGAGATAAAAGACACCAAGGAAGCTTT |
| | | | AGACAAGATAGAGGAAGAGCAAAACAAAAGTAAGAAAAAAGCACAGCAAGCAGCAGCTGACACAGGACAC |
| | | | AGCAATCAGGTCAGCCAAAATTACCCTATAGTGCAGAACATCCAGGGGCAAATGGTACATCAGGCCATATC |
| | | | ACCTAGAACTTTAAATGCATGGGTAAAAGTAGTAGAAGAGAAGGCTTTCAGCCCAGAAGTGATACCCATGT |
| | | | TTTCAGCATTATCAGAAGGAGCCACCCCACAAGATTTAAACACCATGCTAAACACAGTGGGGGGACATCAA |
| | | | GCAGCCATGCAAATGTTAAAAGAGACCATCAATGAGGAAGCTGCAGAATGGGATAGAGTGCATCCAGTGC |
| | | | ATGCAGGGCCTATTGCACCAGGCCAGATGAGAGAACCAAGGGGAAGTGACATAGCAGGAACTACTAGTACC |
| | | | CTTCAGGAACAAATAGGATGGATGACAAATAATCCACCTATCCCAGTAGGAGAAATTTATAAAAGATGGA |
| | | | TAATCCTGGGATTAAATAAAATAGTAAGAATGTATAGCCCTACCAGCATTCTGGACATAAGACAAGGACCA |
| | | | AAGGAACCCTTTAGAGACTATGTAGACCGGTTCTATAAAACTCTAAGAGCCGAGCAAGCTTCACAGGAGGT |
| | | | AAAAAATTGGATGACAGAAACCTTGTTGGTCCAAAATGCGAACCCAGATTGTAAGACTATTTTAAAAGCA |
| | | | TTGGGACCAGCGGCTACACTAGAAGAAATGATGACAGCATGTCAGGGAGTAGGAGGACCCGGCCATAAGGC |
| | | | AAGAGTTTTGGCTGAAGCAATGAGCCAAGTAACAAATTCAGCTACCATAATGATGCAGAGAGGCAATTTT |
| | | | AGGAACCAAAGAAAGATTGTTAAGTGTTTCAATTGTGGCAAAGAAGGGCACACAGCCAGAAATTGCAGGG |
| | | | CCCCTAGGAAAAAGGGCTGTTGGAAATGTGGAAAGGAAGGACACCAAATGAAAGATTGTACTGAGAGACA |
| | | | GGCTAATTTTTTAGGGAAGATCTGGCCTTCCTACAAGGGAAGGCCAGGGAATTTTCTTCAGAGCAGACCAG |
| | | | AGCCAACAGCCCCACCAGAAGAGAGCTTCAGGTCTGGGGTAGAGACAACAACTCCCCCTCAGAAGCAGGAG |
| | | | CCGATAGACAAGGAACTGTATCCTTTAACTTCCCTCAGGTCACTCTTTGGCAACGACCCCTCGTCACAATAA |
| | | | AGATAGGGGGGCAACTAAAGGAAGCTCTATTAGATACAGGAGCAGATGATACAGTATTAGAAGAAATGAG |
| | | | TTTGCCAGGAAGATGGAAACCAAAAATGATAGGGGGAATTGGAGGTTTTATCAAAGTAAGACAGTATGAT |
| | | | CAGATACTCATAGAAATCTGTGGACATAAAGCTATAGGTACAGTATTAGTAGGACCTACACCTGTCAACAT |
| | | | AATTGGAAGAAATCTGTTGACTCAGATTGGTTGCACTTTAAATTTTCCCATTAGCCCTATTGAGACTGTAC |
| | | | CAGTAAAATTAAAGCCAGGAATGGATGGCCCAAAAGTTAAACAATGGCCATTGACAGAAGAAAAAATAAA |
| | | | AGCATTAGTAGAAATTTGTACAGAGATGGAAAAGGAAGGGAAAATTTCAAAAATTGGGCCTGAAAATCCA |
| | | | TACAATACTCCAGTATTTGCCATAAAGAAAAAAGACAGTACTAAATGGAGAAAATTAGTAGATTTCAGAG |
| | | | AACTTAATAAGAGAACTCAAGACTTCTGGGAAGTTCAATTAGGAATACCACATCCCGCAGGGTTAAAAAAG |
| | | | AAAAAATCAGTAACAGTACTGGATGTGGGTGATGCATATTTTTCAGTTCCCTTAGATGAAGACTTCAGGAA |
| | | | GTATACTGCATTTACCATACCTAGTATAAACAATGAGACACCAGGGATTAGATATCAGTACAATGTGCTTC |
| | | | CACAGGGATGGAAAGGATCACCAGCAATATTCCAAAGTAGCATGACAAAAATCTTAGAGCCTTTTAGAAA |
| | | | ACAAAATCCAGACATAGTTATCTATCAATACATGGATGATTTGTATGTAGGATCTGACTTAGAAATAGGGC |
| | | | AGCATAGAACAAAAATAGAGGAGCTGAGACAACATCTGTTGAGGTGGGGACTTACCACACCAGACAAAAA |
| | | | ACATCAGAAAGAACCTCCATTCCTTTGGATGGGTTATGAACTCCATCCTGATAAATGGACAGTACAGCCTA |
| | | | TAGTGCTGCCAGAAAAAGACAGCTGGACTGTCAATGACATACAGAAGTTAGTGGGGAAATTGAATTGGGC |
| | | | AAGTCAGATTTACCCAGGGATTAAAGTAAGGCAATTATGTAAACTCCTTAGAGGAACCAAAGCACTAACAG |
| | | | AAGTAATACCACTAACAGAAGAAGCAGAGCTAGAACTGGCAGAAAACAGAGAGATTCTAAAAGAACCAGT |
| | | | ACATGGAGTGTATTATGACCCATCAAAAGACTTAATAGCAGAAATACAGAAGCAGGGGCAAGGCCAATGG |
| | | | ACATATCAAATTTATCAAGAGCCATTTAAAAATCTGAAAACAGGAAAATATGCAAGAATGAGGGGTGCCC |
| | | | ACACTAATGATGTAAAACAATTAACAGAGGCAGTGCAAAAAATAACCACAGAAAGCATAGTAATATGGGG |
| | | | AAAGACTCCTAAATTTAAACTGCCCATACAAAAGGAAACATGGGAAACATGGTGGACAGAGTATTGGCAA |
| | | | GCCACCTGGATTCCTGAGTGGGAGTTTGTTAATACCCCTCCCTTAGTGAAATTATGGTACCAGTTAGAGAA |
| | | | AGAACCCATAGTAGGAGCAGAAACCTTCTATGTAGATGGGGCAGCTAACAGGGAGACTAAATTAGGAAAA |
| | | | GCAGGATATGTTACTAATAGAGGAAGACAAAAAGTTGTCACCCTAACTGACACAACAAATCAGAAGACTG |
| | | | AGTTACAAGCAATTTATCTAGCTTTGCAGGATTCGGGATTAGAAGTAAACATAGTAACAGACTCACAATAT |
| | | | GCATTAGGAATCATTCAAGCACAACCAGATCAAAGTGAATCAGAGTTAGTCAATCAAATAATAGAGCAGT |
| | | | TAATAAAAAAGGAAAAGGTCTATCTGGCATGGGTACCAGCACACAAAGGAATTGGAGGAAATGAACAAGT |
| | | | AGATAAATTAGTCAGTGCTGGAATCAGGAAAGTACTATTTTTAGATGGAATAGATAAGGCCCAAGATGAA |
| | | | CATGAGAAATATCACAGTAATTGGAGAGCAATGGCTAGTGATTTTAACCTGCCACCTGTAGTAGCAAAAGA |
| | | | AATAGTAGCCAGCTGTGATAAATGTCAGCTAAAAGGAGAAGCCATGCATGGACAAGTAGACTGTAGTCCA |
| | | | GGAATATGGCAACTAGATTGTACACATTTAGAAGGAAAAGTTATCCTGGTAGCAGTTCATGTAGCCAGTGG |
| | | | ATATATAGAAGCAGAAGTTATTCCAGCAGAAACAGGGCAGGAAACAGCATATTTTCTTTTAAAATTAGCA |
| | | | GGAAGATGGCCAGTAAAAACAATACATACTGACAATGGCAGCAATTTCACCGGTGCTACGGTTAGGGCCGC |
| | | | CTGTTGGTGGGCGGGAATCAAGCAGGAATTTGGAATTCCCTACAATCCCCAAAGTCAAGGAGTAGTAGAAT |
| | | | CTATGAATAAAGAATTAAAGAAAATTATAGGACAGGTAAGAGATCAGGCTGAACATCTTAAGACAGCAGT |
| | | | ACAAATGGCAGTATTCATCCACAATTTTAAAAGAAAAGGGGGGATTGGGGGGTACAGTGCAGGGGAAAGA |
| | | | ATAGTAGACATAATAGCAACAGACATACAAACTAAAGAATTACAAAAACAAATTACAAAAATTCAAAATT |
| | | | TTCGGGTTTATTACAGGGACAGCAGAAATCCACTTTGGAAAGGACCAGCAAAGCTCCTCTGGAAAGGTGAA |
| | | | GGGGCAGTAGTAATACAAGATAATAGTGACATAAAAGTAGTGCCAAGAAGAAAAGCAAAGATCATTAGGG |
| | | | ATTATGGAAAACAGATGGCAGGTGATGATTGTGTGGCAAGTAGACAGGATGAGGATTAGAACATGGAAAA |
| | | | GTTTAGTAAAACACCATATGTATGTTTCAGGGAAAGCTAGGGGATGGTTTTATAGACATCACTATGAAAG |
| | | | CCCTCATCCAAGAATAAGTTCAGAAGTACACATCCCACTAGGGGATGCTAGATTGGTAATAACAACATATT |
| | | | GGGGTCTGCATACAGGAGAAAGAGACTGGCATTTGGGTCAGGGAGTCTCCATAGAATGGAGGAAAAAGAG |
| | | | ATATAGCACACAAGTAGACCCTGAACTAGCAGACCAACTAATTCATCTGTATTACTTTGACTGTTTTTCAG |
| | | | ACTCTGCTATAAGAAAGGCCTTATTAGGACACATAGTTAGCCCTAGGTGTGAATATCAAGCAGGACATAAC |
| | | | AAGGTAGGATCTCTACAATACTTGGCACTAGCAGCATTAATAACACCAAAAAAGATAAAGCCACCTTTGCC |
| | | | TAGTGTTACGAAACTGACAGAGGATAGATGGAACAAGCCCCAGAAGACCAAGGGCCACAGAGGGAGCCACA |
| | | | CAATGAATGGACACTAGAGCTTTTAGAGGAGCTTAAGAATGAAGCTGTTAGACATTTTCCTAGGATTTGGC |
| | | | TCCATGGCTTAGGGCAACATATCTATGAAACTTATGGGGATACTTGGGCAGGAGTGGAAGCCATAATAAGA |
| | | | ATTCTGCAACAACTGCTGTTTATCCATTTTCAGAATTGGGTGTCGACATAGCAGAATAGGCGTTACTCGAC |
| | | | AGAGGAGAGCAAGAAATGGAGCCAGTAGATCCTAGACTAGAGCCCTGGAAGCATCCAGGAAGTCAGCCTAA |
| | | | AACTGCTTGTACCAATTGCTATTGTAAAAAGTGTTGCTTTCATTGCCAAGTTTGTTTCATAACAAAAGCCT |
| | | | TAGGCATCTCCTATGGCAGGAAGAAGCGGAGACAGCGACGAAGAGCTCATCAGAACAGTCAGACTCATCAA |
| | | | GCTTCTCTATCAAAGCAGTAAGTAGTACATGTAATGCAACCTATACCAATAGTAGCAATAGTAGCATTAGT |
| | | | AGTAGCAATAATAATAGCAATAGTTGTGTGGTCCATAGTAATCATAGAATATAGGAAAATATTAAGACAA |
| | | | AGAAAAATAGACAGGTTAATTGATAGACTAATAGAAAGAGCAGAAGACAGTGGCAATGAGAGTGAAGGAG |
| | | | AAATATCAGCACTTGTGGAGATGGGGGTGGAGATGGGGCACCATGCTCCTTGGGATGTTGATGATCTGTAG |
| | | | TGCTACAGAAAAATTGTGGGTCACAGTCTATTATGGGGTACCTGTGTGGAAGGAAGCAACCACCACTCTAT |
| | | | TTTGTGCATCAGATGCTAAAGCATATGATACAGAGGTACATAATGTTTGGGCCACACATGCCTGTGTACCC |
| | | | ACAGACCCCAACCCACAAGAAGTAGTATTGGTAAATGTGACAGAAAATTTTAACATGTGGAAAAATGACA |
| | | | TGGTAGAACAGATGCATGAGGATATAATCAGTTTATGGGATCAAAGCCTAAAGCCATGTGTAAAATTAAC |
| | | | CCCACTCTGTGTTAGTTTAAAGTGCACTGATTTGAAGAATGATACTAATACCAATAGTAGTAGCGGGAGAA |
| | | | TGATAATGGAGAAAGGAGAGATAAAAAACTGCTCTTTCAATATCAGCACAAGCATAAGAGGTAAGGTGCA |
| | | | GAAAGAATATGCATTTTTTTATAAACTTGATATAATACCAATAGATAATGATACTACCAGCTATAAGTTG |
| | | | ACAAGTTGTAACACCTCAGTCATTACACAGGCCTGTCCAAAGGTATCCTTTGAGCCAATTCCCATACATTA |
| | | | TTGTGCCCCGGCTGGTTTTGCGATTCTAAAATGTAATAATAAGACGTTCAATGGAACAGGACCATGTACAA |
| | | | ATGTCAGCACAGTACAATGTACACATGGAATTAGGCCAGTAGTATCAACTCAACTGCTGTTAAATGGCAGT |
| | | | CTAGCAGAAGAAGAGGTAGTAATTAGATCTGTCAATTTCACGGACAATGCTAAAACCATAATAGTACAGCT |
| | | | GAACACATCTGTAGAAATTAATTGTACAAGACCCAACAACAATACAAGAAAAAGAATCCGTATCCAGAGA |
| | | | GGACCAGGGAGAGCATTTGTTACAATAGGAAAAATAGGAAATATGAGACAAGCACATTGTAACATTAGTA |
| | | | GAGCAAAATGGAATAACACTTTAAAACAGATAGCTAGCAAATTAAGAGAACAATTTGGAAATAATAAAAC |
| | | | AATAATCTTTAAGCAATCCTCAGGAGGGGACCCAGAAATTGTAACGCACAGTTTTAATTGTGGAGGGGAAT |
| | | | TTTTCTACTGTAATTCAACACAACTGTTTAATAGTACTTGGTTTAATAGTACTTGGAGTACTGAAGGGTCA |
| | | | AATAACACTGAAGGAAGTGACACAATCACCCTCCCATGCAGAATAAAACAAATTATAAACATGTGGCAGA |
| | | | AAGTAGGAAAAGCAATGTATGCCCCTCCCATCAGTGGACAAATTAGATGTTCATCAAATATTACAGGGCTG |
| | | | CTATTAACAAGAGATGGTGGTAATAGCAACAATGAGTCCGAGATCTTCAGACCTGGAGGAGGAGATATGA |
| | | | GGGACAATTGGAGAAGTGAATTATATAAATATAAAGTAGTAAAAATTGAACCATTAGGAGTAGCACCCAC |
| | | | CAAGGCAAAGAGAAGAGTGGTGCAGAGAGAAAAAAGAGCAGTGGGAATAGGAGCTTTGTTCCTTGGGTTC |
| | | | TTGGGAGCAGCAGGAAGCACTATGGGCGCAGCCTCAATGACGCTGACGGTACAGGCCAGACAATTATTGTC |
| | | | TGGTATAGTGCAGCAGCAGAACAATTTGCTGAGGGCTATTGAGGCGCAACAGCATCTGTTGCAACTCACAG |
| | | | TCTGGGGCATCAAGCAGCTCCAGGCAAGAATCCTGGCTGTGGAAAGATACCTAAAGGATCAACAGCTCCTG |
| | | | GGGATTTGGGGTTGCTCTGGAAAACTCATTTGCACCACTGCTGTGCCTTGGAATGCTAGTTGGAGTAATAA |
| | | | ATCTCTGGAACAGATTTGGAATCACACGACCTGGATGGAGTGGGACAGAGAAATTAACAATTACACAAGCT |
| | | | TAATACACTCCTTAATTGAAGAATCGCAAAACCAGCAAGAAAAGAATGAACAAGAATTATTGGAATTAGA |
| | | | TAAATGGGCAAGTTTGTGGAATTGGTTTAACATAACAAATTGGCTGTGGTATATAAAATTATTCATAATG |
| | | | ATAGTAGGAGGCTTGGTAGGTTTAAGAATAGTTTTTGCTGTACTTTCTATAGTGAATAGAGTTAGGCAGG |
| | | | GATATTCACCATTATCGTTTCAGACCCACCTCCCAACCCCGAGGGGACCCGACAGGCCCGAAGGAATAGAA |
| | | | GAAGAAGGTGGAGAGAGAGACAGAGACAGATCCATTCGATTAGTGAACGGATCCTTGGCACTTATCTGGG |
| | | | ACGATCTGCGGAGCCTGTGCCTCTTCAGCTACCACCGCTTGAGAGACTTACTCTTGATTGTAACGAGGATT |
| | | | GTGGAACTTCTGGGACGCAGGGGGTGGGAAGCCCTCAAATATTGGTGGAATCTCCTACAGTATTGGAGTCA |
| | | | GGAACTAAAGAATAGTGCTGTTAGCTTGCTCAATGCCACAGCCATAGCAGTAGCTGAGGGGACAGATAGGG |
| | | | TTATAGAAGTAGTACAAGGAGCTTGTAGAGCTATTCGCCACATACCTAGAAGAATAAGACAGGGCTTGGA |
| | | | AAGGATTTTGCTATAAGATGGGTGGCAAGTGGTCAAAAAGTAGTGTGATTGGATGGCCTACTGTAAGGGA |
| | | | AAGAATGAGACGAGCTGAGCCAGCAGCAGATAGGGTGGGAGCAGCATCTCGAGACCTGGAAAAACATGGA |
| | | | GCAATCACAAGTAGCAATACAGCAGCTACCAATGCTGCTTGTGCCTGGCTAGAAGCACAAGAGGAGGAGGA |
| | | | GGTGGGTTTTCCAGTCACACCTCAGGTACCTTTAAGACCAATGACTTACAAGGCAGCTGTAGATCTTAGCC |
| | | | ACTTTTTAAAAGAAAAGGGGGGACTGGAAGGGCTAATTCACTCCCAAAGAAGACAAGATATCCTTGATCTG |
| | | | TGGATCTACCACACACAAGGCTACTTCCCTGATTAGCAGAACTACACACCAGGGCCAGGGGTCAGATATCC |
| | | | ACTGACCTTTGGATGGTGCTACAAGCTAGTACCAGTTGAGCCAGATAAGATAGAAGAGGCCAATAAAGGA |
| | | | GAGAACACCAGCTTGTTACACCCTGTGAGCCTGCATGGGATGGATGACCCGGAGAGAGAAGTGTTAGAGTG |
| | | | GAGGTTTGACAGCCGCCTAGCATTTCATCACGTGGCCCGAGAGCTGCATCCGGAGTACTTCAAGAACTGCT |
| | | | GACATCGAGCTTGCTACAAGGGACTTTCCGCTGGGGACTTTCCAGGGAGGCGTGGCCTGGGCGGGACTGGG |
| | | | GAGTGGCGAGCCCTCAGATCCTGCATATAAGCAGCTGCTTTTTGCCTGTACTGGGTCTCTCTGGTTAGACC |
| | | | AGATCTGAGCCTGGGAGCTCTCTGGCTAACTAGGGAACCCACTGCTTAAGCCTCAATAAAGCTTGCCTTGA |
| | | | GTGCTTC |
| BBTVR | NC_003479.1 | 480 | AGATGTCCCGAGTTAGTGCGCCACGTAAGCGCTGGGGCTTATTATTACCCCCAGCGCTCGGG |
| | | | ACGGGACATTTGCATCTATAAATAGACCTCCCCCCTCTCCATTACAAGATCATCATCGACGAC |
| | | | AGAATGGCGCGATATGTGGTATGCTGGATGTTCACCATCAACAATCCCACAACACTACCAGT |
| | | | GATGAGGGATGAGATAAAATATATGGTATATCAAGTGGAGAGGGGACAGGAGGGTACTCGT |
| | | | CATGTGCAAGGTTATGTCGAGATGAAGAGACGAAGCTCTCTGAAGCAGATGAGAGGCTTCTT |
| | | | CCCAGGCGCACACCTTGAGAAACGAAAGGGAAGCCAAGAAGAAGCGCGGTCATACTGTATG |
| | | | AAGGAAGATACAAGAATCGAAGGTCCCTTCGAGTTTGGTTCATTTAAATTGTCATGTAATGA |
| | | | TAATTTATTTGATGTCATACAGGATATGCGTGAAACGCACAAAAGGCCTTTGGAGTATTTATA |
| | | | TGATTGTCCTAACACCTTCGATAGAAGTAAGGATACATTATACAGAGTACAAGCAGAGATGA |
| | | | ATAAAACGAAGGCGATGAATAGCTGGAGAACTTCTTTCAGTGCTTGGACATCAGAGGTGGAG |
| | | | AATATCATGGCGCAGCCATGTCATCGGAGAATAATTTGGGTCTATGGCCCAAATGGAGGAGA |
| | | | AGGAAAGACAACGTATGCAAAACATCTAATGAAGACGAGAAATGCGTTTTATTCTCCAGGAG |
| | | | GAAAATCATTGGATATATGTAGACTGTATAATTACGAGGATATTGTTATATTTGATATTCCAA |
| | | | GATGCAAAGAGGATTATTTAAATTATGGGTTATTAGAGGAATTTAAGAATGGAATAATTCAA |
| | | | AGCGGGAAATATGAACCCGTTTTGAAGATAGTAGAATATGTCGAAGTCATTGTAATGGCTAA |
| | | | CTTCCTTCCGAAGGAAGGAATCTTTTCTGAAGATCGAATAAAGTTGGTTTCTTGCTGAACAAG |
| | | | TAATGACTTTACAGCGCACGCTCCGACAAAAGCACACTATGACAAAAGTACGGGTATCTGAT |
| | | | TGGGTTATCTTAACGATCTAGGGCCGTAGGCCCGTGAGCAATGAACGGCGAGATC |
| BBTVN | NC_003476.1 | 481 | AGCACGGGGGACTATTATTACCCCCCGTGCTCGGGACGGGACATGACGTCAGCAAGGATTAT |
| | | | AATGGGCTTTTTATTAGCCCATTTATTGAATTGGGCCGGGTTTTGTCATTTTACAAAAGCCCG |
| | | | GTCCAGGATAAGTATAATGTCACGTGCCGAATTAAAAGGTTGCTTCGCCACGAAGAAACCTA |
| | | | ATTTGAGGTTGCGTATTCAATACGCTACCGAATATCTATTAATATGTGAGTCTCTGCCGAAAA |
| | | | AAATCAGAGCGAAAGCGGAAGGCAGAAGCGATGGATTGGGCGGAATCACAATTCAAGACCT |
| | | | GTACTCATGGATGCGATTGGAAGAAGATATCATCGGATTCAGCCGATAATCGACAATATGTA |
| | | | CCATGCGTCGATTCTGGAGCTGGAAGAAAGTCGCCTCGCAAGGTACTTCTTAGATCTATTGA |
| | | | AGCTGTGTTTAACGGAAGCTTCAGCGGAAATAATAGGAATGTTCGTGGATTTCTCTACGTATC |
| | | | GATCAGAGACGATGACGGAGAAATGCGTCCAGTACTCATAGTACCATTCGGAGGATATGGAT |
| | | | ATCATAATGATTTTTATTATTTCGAAGGGAAGGGGAAAGTTGAATGTGATATATCATCAGATT |
| | | | ATGTTGCGCCAGGAATAGATTGGAGCAGAGACATGGAAGTTAGTATTAGTAACAGCAACAA |
| | | | CTGTAATGAATTATGTGATCTGAAGTGTTATGTTGTTTGTTCGTTAAGAATCAAGGAATAAAA |
| | | | GTTGTGCTGTAATGTTAATTAATAAAACGTATATTTGGGAAATTGATAGTTGTATAAAACATA |
| | | | CAACACACTATGAAATACAAGACGCTATGACAAATGTACGGGTATCTGAATGAGTTTTAGTA |
| | | | TCGCTTAAGGGCCGCAGGCCCGTTAAAAATAATAATCGAATTATAAACGTTAGATAATAATC |
| | | | AGAGATAGGTGATCAGATAATATAAACATAAACGAAGTATATGCCGGTACAATAATAAAAT |
| | | | AAGTAATAACAAAAAAAATATGTATACTAATCTCTGATTGGTTCAGGAGAAAGGCCCACCAA |
| | | | CTAAAAGGTGGGGAGAATGTCCCGATGACGTA |
| BBTVM | 003474.1 | 482 | AGCGCTGGGGCTTATTATTACCCCCAGCGCTCGGGACGGGACATCACGTGCGTCAACAAATGCACGTGACT |
| | | | GATATAAGGGACATAACGGGTTTAGATAACGGTTTATGCGGATTAGAATATAACGTCACGTGTGAAAGCC |
| | | | GAAAGGCACGTGACGAAGACAAATGGATTGAATAAACATTTGACGTCCGGTAGCTTCCGAAGGAAGTAAG |
| | | | CTTCGCGGCGAAGCAAACCATTTATATATTTGCGTAGGCTTGCGGCCTATAAATAGGACGCAGCTAAATGG |
| | | | CATTAACAACAGAGCGGGTGAAACTATTCTTTGAATGGTTTCTGTTCTTTGGAGCAATATTTATTGCGATT |
| | | | ACAATATTATATATATTGTTGGTTTTGCTCTTTGAGGTACCCAGGTATATTAAGGAGCTCGTGAGGTGTTT |
| | | | GGTAGAATACCTGACCAGACGACGTGTATGGATGCAGAGGACGCAGTTGACGGAGGCAACTGGAGATGTA |
| | | | GAGATCGGCAGAGGTATTGTGGAAGACAGACGAGATCAAGAACCGGCTGTCATACCACATGTATCTCAGGT |
| | | | AATCCCTTCTCAACCAAATAGAAGGGATGATCAAGGAAGACGAGGAAACGCTGGACCTATGTTCTAATACA |
| | | | CGGTATATTAATATACGAAATATAAATGGGTATTGATGTAAATGATCATACATAATATATGTATGATAAT |
| | | | GAAACATATTGTAATATGTGAATTGTAAACGAGAGTTGTATGTATAAAACATACAACACGCTATGAAATA |
| | | | CAAGACGCTATGACAAAAGTACTGGTATATGATTAGGTATCCTAACGATCTAGGGCCGAAGGCCCGTGAGC |
| | | | AATATGCGTCGAAATAATGTTTAACAAACAAATATACATGATACGGATAGTTGAATACATAAACAACGAG |
| | | | GTATACAATACAACAAACTGTTGTAAAGAAATAAAAAATAAGAAGAGATAGTATATTTGTGTTGGATAAG |
| | | | CCTTGCAACCACCACTTTAGTGGTGGGCCAGATGTCCCGAGTTAGTGCGCCACGTA |
| BBTVC | NC_003477.1 | 483 | AGCGCTGGGGCTTATTATTACCCCCAGCGCTCGGGACGGGACATCACGTGCAACTAACAGACGCACGTGAG |
| | | | AATGCAGTAGCTTGCAGCGAAAGATAGACGTCAACATCAATAAAGAAGAAGGAATATTCTTTGCTTCGGC |
| | | | ACGAAGCAAAGGGTATAGATATTTGTTCGAGATGCGAAAATGGAGGCTATTTAAACCTGATGGTTTTGTG |
| | | | ATTTCCGAAATCACTCGTCGGAAGAGAAATGGAGTTCTGGGAATCGTCTGCCATGCCTGACGATGTCAAGA |
| | | | GAGAGATTAAGGAAATATATTGGGAAGATCGGAAGAAACTTCTGTTCTGTCAGAAGTTGAAGAGCTATGT |
| | | | CAGAAGGATTCTTGTTTATGGAGATCAAGAGGATGCCCTTGCCGGAGTGAAGGATATGAAGACTTCTATTA |
| | | | TTCGCTATAGCGAATACTTGAAGAAACCATGTGTGGTAATTTGTTGTGTTAGCAATAAATCAATTGTGTAT |
| | | | AGGTTAAACAGCATGGTGTTCTTTTATCATGAATACCTTGAAGAACTAGGTGGTGATTACTCAGTATATCA |
| | | | AGATCTCTATTGTGATGAGGTACTCTCTTCTTCATCGACAGAGGAAGAAGATGTAGGAGTAATATATAGG |
| | | | AATGTTATCATGGCATCGACACAAGAGAAGTTCTCTTGGAGTGATTGTCAGCAGATAGTTATATCAGACTA |
| | | | TGATGTAACATTACTCTAATGTAATATCCATTATCATCAATAAAATAATGGAATGTTGATTATGTATTTA |
| | | | TCATAAATACATAATGGTATACGTATAGCATAAAATACATTAACCAACATACAACACACTATAAAATACA |
| | | | ACACACTATAACAAATGTACGGGTATTTGATTGGGCTATATTAACCCCTTAAGGGCCGAAGGCCCGTTTAA |
| | | | ATATGTGTTGGACGAAGTCCAAACACAAAAAAGTAAGCAGAACAACGGAATAATATGAGCTGGCAACGTA |
| | | | GGGTCCATGTCCCGAGTTAGTGCGCCACGTA |
| BBTVU3 | NC_003475.1 | 484 | GGCGCTGGGGCTTATTATTACCCCCAGCGCCGGGACGGGACATGGGCTTTTTAAATGGGCTTTGCGAGTTT |
| | | | GAACAGTTCAGTATCTTCGTTATTGGGCCAACCCGGCCCAATAATTAAGAGAACGTGTTCAAATTCGTGGT |
| | | | ATGACCGAAGGTCAAGGTAACCGGTCAACATTATTCTGGCTTGCGCAGCAAGATACACGAATTAATTTATT |
| | | | AATTCGTAGGACACGTGGACGGACCGAAATACTCTTGCATCTCTATAAATACCCTAATCCTGTCAAGGATA |
| | | | ATTGCTCTCTCTCTTCTGTCAAGGTGGTTGTGCTGAGGCGGAAGATCGCCAGCGGCGATCGTCGGAACGAC |
| | | | CTGCATCTAGAGAGGCGGCGAGGAAACTACGAAGCGTATATCGGGTATTTATAGACTTATAGCGTAGCTAG |
| | | | AAGTATACACTGTACAGATATTGTATCTTGTAAATTACGAAGCAATTCGTATTTGATATTAATAAAACAA |
| | | | CTGGGTTTGTTAATGTTTACATTAACTAGTATCTTATATGTACAAATTAAAATACAGTATACGGAACGTAT |
| | | | ACTAACGTAAAAATTAAATGATAGGCGAAGCATGATTAACAGGTGTTTAGGTATAATTAACATAATTATG |
| | | | AGAAGTAATAATAATACGGAAAATGAATAAGTATGAGGTGAAAGAGGAGATATTAGAATATTTAAAAACC |
| | | | CAATTATATTATTTTGGAACGAAATACAACACGCTATGAAATACAAGACGCTATGACAAATGTACGGGAA |
| | | | TATGATTGTGTATCTTAACGTATAAGGGCCGCAGGCCCGTCAAGTTGAATGAACGGTCCAGATTAATTCCT |
| | | | TAGCGACGAAGAAAGGAATCTTAAAGGGGACCACATTAAAGACAGCTGTCATTGATTAAATAAATAATAT |
| | | | AATAACCAAAAGACCTTTGTACCCTTCCTAATGATGACGTATAGGGGTGTCCCGATGTAATTTAACATAGC |
| | | | TCTGAAAAGAGATATGGGCCGTTGGATGCCTCCATCGGACGATGGAGGTTGAATGAACTTCTGCTGACGTA |
| BBTVS | NC_003473.1 | 485 | AGCGCTGGGGACTATTATTACCCCCAGCGCTCGGGACGGGACATGGGCTAATGGATTGTGGATATAGGGCC |
| | | | CAAAGGGCCCGTTTAGATGGGTTTTGGGCTCATGGGCTTTATCCAGAAGACCAAAAACAGGCGGGAACCGT |
| | | | CCCAAATTCAAACTTCGATTGCTTGCCCTGCAACGCATCTAGAAGTCTATAAATACCAGTGTCTAGATAGA |
| | | | TGTTCAGACAAGAAATGGCTAGGTATCCGAAGAAATCCATCAAGAAGAGGCGGGTTGGGCGCCGGAAGTA |
| | | | TGGCAGCAAGGCGGCAACGAGCCACGACTACTCGTCGTCAGGGTCAATATTGGTTCCTGAAAACACCGTCA |
| | | | AGGTATTTCGGATTGAGCCTACTGATAAAACATTACCCAGATATTTTATCTGGAAAATGTTTATGCTTCTT |
| | | | GTGTGCAAGGTGAAGCCCGGAAGAATACTTCATTGGGCTATGATCAAGAGTTCTTGGGAAATCAACCAGCC |
| | | | GACAACCTGTCTGGAAGCCCCAGGTTTATTTATTAAACCTGAACACAGCCATCTGGTTAAACTGGTATGTA |
| | | | GTGGGGAACTTGAAGCAGGAGTCGCAACAGGAACATCAGATGTTGAATGTCTTTTGAGGAAGACAACCGT |
| | | | GTTGAGGAAGAATGTAACAGAGGTGGATTATTTATATTTGGCATTCTATTGTAGTTCTGGAGTAAGTATA |
| | | | AACTACCAGAACAGAATTACATATCATGTTTGATATGTTTATGTAAACATAAACTATTGTATGGAATGAA |
| | | | ATCCAAATAACATACAACACGCTATGAAATACAAGACGCTATGACAAAAGTACTGGTATATGATTAGGTA |
| | | | TCCTAACGATCTAGGGCCGAAGGCCCGTGAGCAATATGCGTCGAAATAATGTTTAACAAACAAATATACAT |
| | | | GATACGGATAGTTGAATACATAAACAACGAGGTATACAATACAACAAACTGTTGTAAAGAAATAAAAAAT |
| | | | AAGAAGAGAGAGTATATTTGTGTCGGATAAGCATCACACCCACCACTTTAGTGGTGGGCCAGATGTCCCGA |
| | | | GTTAGTGCGCCACGTA |

[0221] Having thus described several aspects of at least one embodiment of this invention, it is to be appreciated various alterations, modifications, and improvements will readily occur to those skilled in the art. Such alterations, modifications, and improvements are intended to be part of this disclosure, and are intended to be within the spirit and scope of the invention. Accordingly, the foregoing description and drawings are by way of example only.

The application's sequence listing, which the Patent Office published only in electronic form, follows.

SEQUENCE LISTING (507 sequences)

SEQ ID NO: 1 - protein, 158 aa, Artificial Sequence
  Synthetic Polypeptide
SYSITTPSQFVFLSSAWADPIELINLCTNALGNQFQTQQARTVVQRQFSEVWKPSPQVTVRFPDSDFKVYRYNAVLDPLVTALLGAFDTRNRIIEVENQANPTTAETLDATRRVDDATVAIRSAINNLIVELIRGTGSYNRSSFESSSGLVWTSGPAT

SEQ ID NO: 2 - protein, 1615 aa, Artificial Sequence
  Synthetic Polypeptide
  misc_feature (1116)..(1116): Xaa can be any naturally occurring amino acid
AYTQTATTSALLDTVRGNNSLVNDLAKRRLYDTAVEEFNARDRRPKVNFSKVISEEQTLIATRAYPEFQITFYNTQNAVHSLAGGLRSLELEYLMMQIPYGSLTYDIGGNFASHLFKGRAYVHCCMPNLDVRDIMRHEGQKDSIELYLSRLERGGKTVPNFQKEAFDRYAEIPEDAVCHNTFQTMRHQPMQQSGRVYAIALHSIYDIPADEFGAALLRKNVHTCYAAFHFSENLLLEDSYVNLDEINACFSRDGDKLTFSFASESTLNYCHSYSNILKYVCKTYFPASNREVYMKEFLVTRVNTWFCKFSRIDTFLLYKGVAHKSVDSEQFYTAMEDAWHYKKTLAMCNSERILLEDSSSVNYWFPKMRDMVIVPLFDISLETSKRTRKEVLVSKDFVFTVLNHIRTYQAKALTYANVLSFVESIRSRVIINGVTARSEWDVDKSLLQSLSMTFYLHTKLAVLKDDLLISKFSLGSKTVCQHVWDEISLAFGNAFPSVKERLLNRKLIRVAGDALEIRVPDLYVTFHDRLVTEYKASVDMPALDIRKKMEETEVMYNALSELSVLRESDKFDVDVFSQMCQSLEVDPMTAAKVIVAVMSNESGLTLTFERPTEANVALALQDQEKASEGALVVTSREVEEPSMKGSMARGELQLAGLAGDHPESSYSKNEEIESLEQFHMATADSLIRKQMSSIVYTGPIKVQQMKNFIDSLVASLSAAVSNLVKILKDTAAIDLETRQKFGVLDVASRKWLIKPTAKSHAWGVVETHARKYHVALLEYDEQGVVTCDDWRRVAVSSESVVYSDMAKLRTLRRLLRNGEPHVSSAKVVLVDGVPGCGKTKEILSRVNFDEDLILVPGKQAAEMIRRRANSSGIIVATKDNVKTVDSFMMNFGKSTRCQFKRLFIDEGLMLHTGCVNFLVAMSLCEIAYVYGDTQQIPYINRVSGFPYPAHFAKLEVDEVETRRTTLRCPADVTHYLNRRYEGFVMSTSSVKKSVSQEMVGGAAVINPISKPLHGKILTFTQSDKEALLSRGYSDVHTVHEVQGETYSDVSLVRLTPTPVSIIAGDSPHVLVALSRHTCSLKYYTVVMDPLVSIIRDLEKLSSYLLDMYKVDAGTQXQLQIDSVFKGSNLFVAAPKTGDISDMQFYYDKCLPGNSTMMNNFDAVTMRLTDISLNVKDCILDMSKSVAAPKDQIKPLIPMVRTAAEMPRQTGLLENLVAMIKRNFNAPELSGIIDIENTASLVVDKFFDSYLLKEKRKPNKNVSLFSRESLNRWLEKQEQVTIGQLADFDFVDLPAVDQYRHMIKAQPKQKLDTSIQTEYPALQTIVYHSKKINAIFGPLFSELTRQLLDSVDSSRFLFFTRKTPAQIEDFFGDLDSHVPMDVLELDISKYDKSQNEFHCAVEYEIWRRLGFEDFLGEVWKQGHRKTTLKDYTAGIKTCIWYQRKSGDVTTFIGNTVIIAACLASMLPMEKIIKGAFCGDDSLLYFPKGCEFPDVQHSANLMWNFEAKLFKKQYGYFCGRYVIHHDRGCIVYYDPLKLISKLGAKHIKDWEHLEEFRRSLCDVAVSLNNCAYYTQLDDAVWEVHKTAPPGSFVYKSLVKYLSDKVLFRSLFIDGSSC

SEQ ID NO: 3 - protein, 473 aa, Artificial Sequence
  Synthetic Polypeptide
QFYYDKCLPGNSTMMNNFDAVTMRLTDISLNVKDCILDMSKSVAAPKDQIKPLIPMVRTAAEMPRQTGLLENLVAMIKRNFNAPELSGIIDIENTASLVVDKFFDSYLLKEKRKPNKNVSLFSRESLNRWLEKQEQVTIGQLADFDFVDLPAVDQYRHMIKAQPKQKLDTSIQTEYPALQTIVYHSKKINAIFGPLFSELTRQLLDSVDSSRFLFFTRKTPAQIEDFFGDLDSHVPMDVLELDISKYDKSQNEFHCAVEYEIWRRLGFEDFLGEVWKQGHRKTTLKDYTAGIKTCIWYQRKSGDVTTFIGNTVIIAACLASMLPMEKIIKGAFCGDDSLLYFPKGCEFPDVQHSANLMWNFEAKLFKKQYGYFCGRYVIHHDRGCIVYYDPLKLISKLGAKHIKDWEHLEEFRRSLCDVAVSLNNCAYYTQLDDAVWEVHKTAPPGSFVYKSLVKYLSDKVLFRSLFIDGSSC

SEQ ID NO: 4 - protein, 267 aa, Artificial Sequence
  Synthetic Polypeptide
ALVVKGKVNINEFIDLTKMEKILPSMFTPVKSVMCSKVDKIMVHENESLSEVNLLKGVKLIDSGYVCLAGLVVTGEWNLPDNCRGGVSVCLVDKRMERADEATLGSYYTAAAKKRFQFKVVPNYAITTQDAMKNVWQVLVNIRNVKMSAGFCPLSLEFVSVCIVYRNNIKLGLREKITNVRDGGPMELTEEVVDEFMEDVPMSIRLAKFRSRTGKKSDVRKGKNSSNDRSVPNKNYRNVKDFGGMSFKKNNLIDDDSEATVAESDSF

SEQ ID NO: 5 - protein, 39 aa, Artificial Sequence
  Synthetic Polypeptide
MIRRLLSPNRIRFKYVLQYHYSISVRVLVISVGRPNRVN

SEQ ID NO: 6 - protein, 13 aa, Artificial Sequence
  Synthetic Polypeptide
SYSITTPSQFVGK

SEQ ID NO: 7 - protein, 16 aa, Artificial Sequence
  Synthetic Polypeptide
KGDPIELINLCTNALG

SEQ ID NO: 8 - protein, 8 aa, Artificial Sequence
  Synthetic Polypeptide
ADPIELIN

SEQ ID NO: 9 - protein, 8 aa, Artificial Sequence
  Synthetic Polypeptide
ELINLCTN

SEQ ID NO: 10 - protein, 7 aa, Artificial Sequence
  Synthetic Polypeptide
CTNALGN

SEQ ID NO: 11 - protein, 15 aa, Artificial Sequence
  Synthetic Polypeptide
TNALGNQFQTQQART

SEQ ID NO: 12 - protein, 6 aa, Artificial Sequence
  Synthetic Polypeptide
QFQTQQ

SEQ ID NO: 13 - protein, 13 aa, Artificial Sequence
  Synthetic Polypeptide
QARTVVQRQFSEV

SEQ ID NO: 14 - protein, 22 aa, Artificial Sequence
  Synthetic Polypeptide
KPSPQVTVRFPDSDFKVYRYNA

SEQ ID NO: 15 - protein, 14 aa, Artificial Sequence
  Synthetic Polypeptide
RFPDSDFKVYRYNA

SEQ ID NO: 16 - protein, 6 aa, Artificial Sequence
  Synthetic Polypeptide
YNAVLD

SEQ ID NO: 17 - protein, 15 aa, Artificial Sequence
  Synthetic Polypeptide
KGLDPLVTALLGAFD

SEQ ID NO: 18 - protein, 28 aa, Artificial Sequence
  Synthetic Polypeptide
RNRIIEVENQANPTTAETLDATRRVDDA

SEQ ID NO: 19 - protein, 23 aa, Artificial Sequence
  Synthetic Polypeptide
EVENQANPTTAETLDATRRVDDA

SEQ ID NO: 20 - protein, 20 aa, Artificial Sequence
  Synthetic Polypeptide
DDATVAIRSAINNLIVELIR

SEQ ID NO: 21 - protein, 6 aa, Artificial Sequence
  Synthetic Polypeptide
IVELIR

SEQ ID NO: 22 - protein, 13 aa, Artificial Sequence
  Synthetic Polypeptide
RGTGSYNRSSFES

SEQ ID NO: 23 - protein, 6 aa, Artificial Sequence
  Synthetic Polypeptide
SSFESS

SEQ ID NO: 24 - protein, 10 aa, Artificial Sequence
  Synthetic Polypeptide
GLVWTSGPAT

SEQ ID NO: 25 - protein, 9 aa, Artificial Sequence
  Synthetic Polypeptide
FDEDLILVP

SEQ ID NO: 26 - protein, 9 aa, Artificial Sequence
  Synthetic Polypeptide
YLHTKLAVL

SEQ ID NO: 27 - protein, 9 aa, Artificial Sequence
  Synthetic Polypeptide
FIDSLVASL

SEQ ID NO: 28 - protein, 9 aa, Artificial Sequence
  Synthetic Polypeptide
FYLHTKLAV

SEQ ID NO: 29 - protein, 9 aa, Artificial Sequence
  Synthetic Polypeptide
RVYAIALHS

SEQ ID NO: 30 - protein, 9 aa, Artificial Sequence
  Synthetic Polypeptide
VSSAKVVLV

SEQ ID NO: 31 - protein, 9 aa, Artificial Sequence
  Synthetic Polypeptide
VRGNNSLVN

SEQ ID NO: 32 - protein, 9 aa, Artificial Sequence
  Synthetic Polypeptide
DSLVASLSA

SEQ ID NO: 33 - protein, 9 aa, Artificial Sequence
  Synthetic Polypeptide
VSGFPYPAH

SEQ ID NO: 34 - protein, 9 aa, Artificial Sequence
  Synthetic Polypeptide
FSQMCQSLE

SEQ ID NO: 35 - protein, 9 aa, Artificial Sequence
  Synthetic Polypeptide
GAALLRKNV

SEQ ID NO: 36 - protein, 9 aa, Artificial Sequence
  Synthetic Polypeptide
IIVATKDNV

SEQ ID NO: 37 - protein, 9 aa, Artificial Sequence
  Synthetic Polypeptide
AKVIVAVMS

SEQ ID NO: 38 - protein, 9 aa, Artificial Sequence
  Synthetic Polypeptide
YVNLDEINA

SEQ ID NO: 39 - protein, 9 aa, Artificial Sequence
  Synthetic Polypeptide
EFLVTRVNT

SEQ ID NO: 40 - protein, 9 aa, Artificial Sequence
  Synthetic Polypeptide
YYDPLKLIS

SEQ ID NO: 41 - protein, 9 aa, Artificial Sequence
  Synthetic Polypeptide
FVDLPAVDQ

SEQ ID NO: 42 - protein, 9 aa, Artificial Sequence
  Synthetic Polypeptide
FFDSYLLKE

SEQ ID NO: 43 - protein, 9 aa, Artificial Sequence
  Synthetic Polypeptide
DIENTASLV

SEQ ID NO: 44 - protein, 9 aa, Artificial Sequence
  Synthetic Polypeptide
YYTQLDDAV

SEQ ID NO: 45 - protein, 9 aa, Artificial Sequence
  Synthetic Polypeptide
KVLFRSLFI

SEQ ID NO: 46 - protein, 9 aa, Artificial Sequence
  Synthetic Polypeptide
VYYDPLKLI

SEQ ID NO: 47 - protein, 9 aa, Artificial Sequence
  Synthetic Polypeptide
WYQRKSGDV

SEQ ID NO: 48 - protein, 9 aa, Artificial Sequence
  Synthetic Polypeptide
VDLPAVDQY

SEQ ID NO: 49 - protein, 9 aa, Artificial Sequence
  Synthetic Polypeptide
PRQTGLLEN

SEQ ID NO: 50 - protein, 9 aa, Artificial Sequence
  Synthetic Polypeptide
FIGNTVIIA

SEQ ID NO: 51 - protein, 9 aa, Artificial Sequence
  Synthetic Polypeptide
PMVRTAAEM

SEQ ID NO: 52 - protein, 9 aa, Artificial Sequence
  Synthetic Polypeptide
YPALQTIVY

SEQ ID NO: 53 - protein, 9 aa, Artificial Sequence
  Synthetic Polypeptide
RQLLDSVDS

SEQ ID NO: 54 - protein, 9 aa, Artificial Sequence
  Synthetic Polypeptide
MIRRLLSPN

SEQ ID NO: 55 - protein, 9 aa, Artificial Sequence
  Synthetic Polypeptide
SISVRVLVI

SEQ ID NO: 56 - protein, 9 aa, Artificial Sequence
  Synthetic Polypeptide
FKYVLQYHY

SEQ ID NO: 57 - protein, 9 aa, Artificial Sequence
  Synthetic Polypeptide
QYHYSISVR

SEQ ID NO: 58 - protein, 9 aa, Artificial Sequence
  Synthetic Polypeptide
MMIRRLLSP

SEQ ID NO: 59 - protein, 9 aa, Artificial Sequence
  Synthetic Polypeptide
RVLVISVGR

SEQ ID NO: 60 - protein, 9 aa, Artificial Sequence
  Synthetic Polypeptide
YVLQYHYSI

SEQ ID NO: 61 - protein, 9 aa, Artificial Sequence
  Synthetic Polypeptide
RIRFKYVLQ

SEQ ID NO: 62 - protein, 9 aa, Artificial Sequence
  Synthetic Polypeptide
YHYSISVRV

SEQ ID NO: 63 - protein, 9 aa, Artificial Sequence
  Synthetic Polypeptide
YSISVRVLV

SEQ ID NO: 64 - protein, 9 aa, Artificial Sequence
  Synthetic Polypeptide
KYVLQYHYS

SEQ ID NO: 65 - protein, 9 aa, Artificial Sequence
  Synthetic Polypeptide
IRRLLSPNR

SEQ ID NO: 66 - protein, 9 aa, Artificial Sequence
  Synthetic Polypeptide
YSISVRVLV

SEQ ID NO: 67 - protein, 9 aa, Artificial Sequence
  Synthetic Polypeptide
VRVLVISVG

SEQ ID NO: 68 - protein, 9 aa, Artificial Sequence
  Synthetic Polypeptide
LLSPNRIRF

SEQ ID NO: 69 - protein, 129 aa, Artificial Sequence
  Synthetic Polypeptide
MANLNQIQKEVSEILSDQKSMKADIKAILELLGSQNPIKESLETVAAKIVNDLTKLINDCPCNKEILEALGTQPKEQLIEQPKEKGKGLNLGKYSYPNYGVGNEELGSSGNPKALTWPFKAPAGWPNQF

SEQ ID NO: 70 - protein, 327 aa, Artificial Sequence
  Synthetic Polypeptide
MDLYPEENTQSEQSQNSENNMQIFKSENSDGFSSDLMISNDQLKNISKTQLTLEKEKIFKMPNVLSQVMKKAFSRKNEILYCVSTKELSVDIHDATGKVYLPLITKEEINKRLSSLKPEVRKTMSMVHLGAVKILLKAQFRNGIDTPIKIALIDDRINSRRDCLLGAAKGNLAYGKFMFTVYPKFGISLNTQRLNQTLSLIHDFENKNLMNKGDKVMTITYVVGYALTNSHHSIDYQSNATIELEDVFQEIGNVQQSEFCTIQNDECNWAIDIAQNKALLGAKTKTQIGNNLQIGNSASSSNTENELARVSQNIDLLKNKLKEICGE

SEQ ID NO: 71 - protein, 489 aa, Artificial Sequence
  Synthetic Polypeptide
MAESILDRTINRFWYNLGEDCLSESQFDLMIRLMEESLDGDQIIDLTSLPSDNLQVEQVMTTTEDSISEEESEFLLAIGETSEEESDSGEEPEFEQVRMDRTGGTEIPKEEDGEGPSRYNERKRKTPEDRYFPTQPKTIPGQKQTSMGMLNIDCQTNRRTLIDDWAAEIGLIVKTNREDYLDPETILLLMEHKTSGIAKELIRNTRWNRTTGDIIEQVIDAMYTMFLGLNYSDNKVAEKIDEQEKAKIRMTKLQLCDICYLEEFTCDYEKNMYKTELADFPGYINQYLSKIPIIGEKALTRFRHEANGTSIYSLGFAAKIVKEELSKICDLSKKQKKLKKFNKKCCSIGEASTEYGCKKTSTKKYHKKRYKKKYKAYKPYKKKKKFRSGKYFKPKEKKGSKQKYCPKGKKDCRCWICNIEGHYANECPNRQSSEKAHILQQAEKLGLQPIEEPYEGVQEVFILEYKEEEEETSTEESDGSSTSEDSDSD

SEQ ID NO: 72 - protein, 679 aa, Artificial Sequence
  Synthetic Polypeptide
MDHLLLKTQTQTEQVMNVTNPNSIYIKGRLYFKGYKKIELHCFVDTGASLCIASKFVIPEEHWVNAERPIMVKIADGSSITISKVCKDIDLIIAGEIFRIPTVYQQESGIDFIIGNNFCQLYEPFIQFTDRVIFTKNKSYPVHIAKLTRAVRVGTEGFLESMKKRSKTQQPEPVNISTNKIENPLEEIAILSEGRRLSEEKLFITQQRMQKIEELLEKVCSENPLDPNKTKQWMKASIKLSDPSKAIKVKPMKYSPMDREEFDKQIKELLDLKVIKPSKSPHMAPAFLVNNEAEKRRGKKRMVVNYKAMNKATVGDAYNLPNKDELLTLIRGKKIFSSFDCKSGFWQVLLDQESRPLTAFTCPQGHYEWNVVPFGLKQAPSIFQRHMDEAFRVFRKFCCVYVDDILVFSNNEEDHLLHVAMILQKCNQHGIILSKKKAQLFKKKINFLGLEIDEGTHKPQGHILEHINKFPDTLEDKKQLQRFLGILTYASDYIPKLAQIRKPLQAKLKENVPWRWTKEDTLYMQKVKKNLQGFPPLHHPLPEEKLIIETDASDDYWGGMLKAIKINEGTNTELICRYASGSFKAAEKNYHSNDKETLAVINTIKKFSIYLTPVHFLIRTDNTHFKSFVNLNYKGDSKLGRNIRWQAWLSHYSFDVEHIKGTDNHFADFLSREFNKVNS

SEQ ID NO: 73 - protein, 520 aa, Artificial Sequence
  Synthetic Polypeptide
MENIEKLLMQEKILMLELDLVRAKISLARANGSSQQGDLSLHRETPEKEEAVHSALATFTPSQVKAIPEQTAPGKESTNPLMANILPKDMNSVQTEIRPVKPSDFLRPHQGIPIPPKPEPSSSVAPLRDESGIQHPHTNYYVVYNGPHAGIYDDWGCTKAATNGVPGVAHKKFATITEARAAADAYTTSQQTDRLNFIPKGEAQLKPKSFAKALTSPPKQKAHWLMLGTKKPSSDPAPKEISFAPEITMDDFLYLYDLVRKFDGEGDDTMFTTDNEKISLFNFRKNANPQMVREAYAAGLIKTIYPSNNLQEIKYLPKKVKDAVKRFRTNCIKNTEKDIFLKIRSTIPVWTIQGLLHKPRQVIEIGVSKKVVPTESKAMESKIQIEDLTELAVKTGEQFIQSLLRLNDKKKIFVNMVEHDTLVYSKNIKDTVSEDQRAIETFQQRVISGNLLGFHCPAICHFIVKIVEKEGGSYKCHHCDKGKAIVEDASADSGPKDGPPPTRSIVEKEDVPTTSSKQVD

SEQ ID NO: 74 - protein, 520 aa, Artificial Sequence
  Synthetic Polypeptide
MENIEKLLMQEKILMLELDLVRAKISLARANGSSQQGDLSLHRETPVKEEAVHSALATFTPTQVKAIPEQTAPGKESTNPLMASILPKDMNPVQTGIRLAVPGDFLRPHQGIPIPQKSELSSTVVPLRDESGIQHPHINYYVVYNGPHAGIYDDWGCTKAATNGVPGVAHKKFATITEARAAADAYTTSQQTDRLNFIPKGEAQLKPKSFREALTSPPKQKAHWLTLGTKRPSSDPAPKEISFAPEITMDDFLYLYDLGRKFDGEGDDTMFTTDNEKISLFNFRKNADPQMVREAYAAGLIKTIYPSNNLQEIKYLPKKVKDAVKRFRTNCIKNTEKDIFLKIRSTIPVWTIQGLLHKPRQVIEIGVSKKVVPTESKAMESKIQIEDLTELAVKTGEQFIQSLLRLNDKKKIFVNMVEDDTLVYSKNIKDTVSEDQRAIETFQQRVISGNLLGFHCPAICHFIERTVEKEGGSYKVHHCDKGKAIVQDASADSGPKDGPPPTRSIVEKEDVPTTSSKQVD

SEQ ID NO: 75 - protein, 327 aa, Artificial Sequence
  Synthetic Polypeptide
MDLYPEENTQSEQSQNSENNMQIFKSENSDGFSSDLMISNDQLKNISKTQLTLEKEKIFKMPNVLSQVMKKAFSRKNEILYCVSTKELSVDIHDATGKVYLPLITREEINKRLSSLKPEVRKIMSMVHLGAVKILLKAQFRNGIDTPIKIALIDDRINSRRDCLLGAAKGNLAYGKFMFTVYPKFGISLNTQRLNQTLSLIHDFENKNLMNKGDKVMTITYIVGYALTNSHHSIDYQSNATIELEDVFQEIGNVQQSDFCTIQNDECNWAIDIAQNKALLGAKTQSQIGNSLQIGNSASSSNTENELARVSQNIDLLKNKLKEICGE

SEQ ID NO: 76 - protein, 522 aa, Artificial Sequence
  Synthetic Polypeptide
MEDIEKLLLQEKILMLELDLVRAKISLARAKGSMQQGGNSLHRETPVKEEAVHSALATFAPIQAKAIPEQTAPGKESTNPLMVSILPKDMKSVQTEKKRLVTPMDFLRPNQGIQIPQKSEPNSSVAPNRAESGIQHPHSNYYVVYNGPHAGIYDDWGSAKAATNGVPGVAHKKFATITEARAAADVYTTAQQAERLNFIPKGEAQLKPKSFVKALTSPPKQKAQWLTLGVKKPSSDPAPKEVSFDQETTMDDFLYLYDLGRRFDGEGDDTVFTTDNESISLFNFRKNANPEMIREAYNAGLIRTIYPSNNLQEIKYLPKKVKDAVKKFRTNCIKNTEKDIFLKIKSTIPVWQDQGLLHKPKHVIEIGVSKKIVPKESKAMESKDHSEDLIELATKTGEQFIQSLLRLNDKKKIFVNLVEHDTLVYSKNTKETVSEDQRAIETFQQRVITPNLLGFHCPSICHFIKRTVEKEGGAYKCHHCDKGKAIVQDASADSKVADKEGPPLTTNVEKEDVSTTSSKASG

SEQ ID NO: 77 - protein, 520 aa, Artificial Sequence
  Synthetic Polypeptide
MENIEKLLMQEKILMLELDLVRAKISLARANGSSQQGDLPLHRETPVKEEAVHSALATFTPTQVKAIPEQTAPGKESTNPLMASILPKDMNPVQTGIRLAVPGDFLRPHQGIPIPQKSELSSIVAPLRAESGIHHPHINYYVVYNGPHAGIYDDWGCTKAATNGVPGVAYKKFATITEARAAADAYTTSQQTDRLNFIPKGEAQLKPKSFAKALTSPPKQKAHWLTLGTKRPSSDPAPKEISFAPEITMDDFLYLYDLGRKFDGEGDDTMFTTDNEKISLFNFRKNADPQMVREAYAAGLIKTIYPSNNLQEIKYLPKKVKDAVKRFRTNCIKNTEKDIFLKIRSTIPVWTIQGLLHKPRQVIEIGVSKKVVPTESKAMESKIQIEDLTELAVKTGEQFIQSLLRLNDKKKIFVNMVEHDTLVYSKNIKDTVSEDQRAIETFQQRVISGNLLGFHCPAICHFIKRTVEKEGGTYKCHHCDKGKAIVQDASADSGPKDGPPPTRSIVEKEDVPTTSSKQVD

SEQ ID NO: 78 - protein, 522 aa, Artificial Sequence
  Synthetic Polypeptide
MENIEKLLMQEKILMLELDLVRAKISLARANGSSQQGELSLHRETPEKEVAVHSALVTFTPTQVKAIPEQTAPGKESTNPLMASILPKDMNPVQTGTRLAVPSDFLRPHQGIPIPQKSELSSTVVPLRAESGIQHPHINYYVVYNGPHAGIYDDWGCTKAATNGVPGVAHKKFATITEARAAADAYTTRQQTDRLNFIPKGEAQLKPKSFAEALTSPPKQKAHWLTLGTKKPSSDPAPKEISFAPEITMDDFLYLYDLVRKFDGEGDDTMFTTDNEKISLFNFRKNANPQMVREAYAAGLIKTIYPSNNLQEIKYLPKKVKDAVKRFRTNCIKNTEKDIFLKIRSTIPVWTIQGLLHKPRQVIEIGVSKKVIPTESKAMESRIQIEDLTELAVKTGEQFIQSLLRLNDKKKIFVNMVEHDTLVYSKNIKETDSEDQRAIETFQQRVISGNLLGFHCPAICHFIMKTVEKEGGAYKCHHCDKGKAIVQDASADEGTTDKSGPPPTRSIVEKEDVPNTSSKQVD

SEQ ID NO: 79 - protein, 522 aa, Artificial Sequence
  Synthetic Polypeptide
MENIEKLLMQEKILMLELDLVRAKISLARANGSSQQGDLSLHRETPVKEEAVHSALATFTPTQVKAIPEQTAPGKESTNPLMASILPKDMNSVQTENRLVKPLDFLRPHQGIPIPQKSEPNSSVTLHRVESGIQHPHTNYYVVYNGPHAGIYDDWGCTKAATNGVPGVAHKKFATITEARAAADAYTTNQQTGRLNFIPKGEAQLKPKSFAKALISPPKQKAHWLTLGTKKPSSDPAPKEISFDPEITMDDFLYLYDLARKFDGEDDGTIFTTDNEKISLFNFRKNANPQMVREAYTAGLIKTIYPSNNLQEIKYLPKKVKDAVKRFRTNCIKNTEKDIFLKIRSTIPVWTIQGLLHKPRQVIEIGVSKKIVPTESKAMESKIQIEDLTELAVKSGEQFIQSLLRLNDKKKIFVNMVEHDTLVYSKNIKDTVSEDQRAIETFQQRVISGNLLGFHCPAICHFIMKTVEKEGGAYKCHHCEKGKAIVKDASTDRGTTDKDGPPPTRSIVEKEDVPTTSSKQVD

SEQ ID NO: 80 - protein, 488 aa, Artificial Sequence
  Synthetic Polypeptide
MAESILDRTINRFWYNLGEDCLSESQFDLMIRLMEESLDGDQIIDLTSLPSDNLQVEQVMTTTDDSISEESEFLLAIGEISEDESDSGEEPEFEQVRMDRTGGTEIPKEEDGEGPSRYNERKRKTPEDRYFPTQPKTIPGQKQTSMGMLNIDCQINRRTLIDDWAAEIGLIVKTNREDYLDPETILLLMEHKTSGIAKELIRNTRWNRTTGDIIEQVINAMYTMFLGLNYSDNKVAEKIDEQEKAKIRMTKLQLFDICYLEEFTCDYEKNMYKTEMADFPGYINQYLSKIPIIGEKALTRFRHEANGTSIYSLGFAAKIVKEELSKICDLSKKQKKLKKFNKKCCSIGEASVEYGGKKTSKKKYHKRYKKRYKVYKPYKKKKKFRSGKYFKPKEKKGSKRKYCPKGKKDCRCWICNIEGHYANECPNRQSSEKAHILQQAENLGLQPVEEPYEGVQEVFILEYKEEEEETSTEESDDESSTSEDSDSD

SEQ ID NO: 81 - protein, 490 aa, Artificial Sequence
  Synthetic Polypeptide
MAESILDRTINRFWYKLGDDCLSESQFDLMIRLMEESLDGDQIIDLTSLPSDNLQVEQVMTTTEDSISEEESEFLLAIGETSEEESDSGEEPEFEQVRMDRTGGTEIPKEEDGGEPSRYNERKRKTTEDRYFPTQPKTIPGQKQTTMGMLNIDCQANRRTLIDDWAAEIGLIVKTNREDYLDPETILLLMEHKTSGIAKELIRNTRWNRTTGDIIEQVIDAMYTMFLGLNYSDNKVAEKIEEQEKAKIRMTKLQLCDICYLEEFTCDYEKNMYKTELADFPGYINQYLSKIPIIGEKALTRFRHEANGTSIYSLGFAAKIVKEELSKICDLTKKQKKLKKFNKKCCSIGEASVEYGCKKTSKKKYHKRYKKKYKAYKPYKKKKKFRSGKYFKPKEKKGSKQKYCPKGKKDCRCWICNIEGHYANECPNRQSSEKAHILQQAEKLGLQPIEEPYEGVQEVFILEYKEEEEETSTEEDDGSSTSEDSDSESD

SEQ ID NO: 82 - protein, 674 aa, Artificial Sequence
  Synthetic Polypeptide
MDHLLQKTQIQNQTEQVMNITNPNSIYIKGRLYFKGYKKIELHCFVDTGASLCIASKFVIPEEHWINAERPIMVKIADGSSITINKVCRDIDLIIAGEIFHIPTVYQQESGIDFIIGNNFCQLYEPFIQFTDRVIFTKDRTYPVHIAKLTRAVRVGTEGFLESMKKRSKTQQPEPVNISTNKIAILSEGRRLSEEKLFITQQRMQKIEELLEKVCSENPLDPNKTKQWMKASIKLSDPSKAIKVKPMKYSPMDREEFDKQIKELLDLKVIKPSKSPHMAPAFLVNNEAEKRRGKKRMVVNYKAMNKATVGDAYNPPNKDELLTLIRGKKIFSSFDCKSGFWQVLLDQESRPLTAFTCPQGHYEWNVVPFGLKQAPSIFQRHMDEAFRVFRKFCCVYVDDILVFSNNEEDHLLHVAMILQKCNQHGIILSKKKAQLFKKKINFLGLEIDEGTHKPQGHILEHINKFPDTLEDKKQLQRFLGILTYASDYIPKLAQIRKPLQAKLKENVPWKWTKEDTLYMQKVKKNLQGFPPLHHPLPEEKLIIETDASDDYWGGMLKAIKINEGTNTELICRYASGSFKAAEKNYHSNDKETLAVINTIKKFSIYLTPVHFLIRTDNTHFKSFVNLNYKGDSKLGRNIRWQAWLSHYSFDVEHIKGTDNHFADFLSREFNRVNS

SEQ ID NO: 83 - protein, 679 aa, Artificial Sequence
  Synthetic Polypeptide
MDHLLLKTQTQTEQVMNVTNPNSIYIKGRLYFKGYKKIELHCFVDTGASLCIASKFVIPEEHWVNAERPIMVKIADGSSITISKVCKDIDLIIAREIFKIPTVYQQESGIDFIIGNNFCQLYEPFIQFTDRVIFTKNKSYPVHIAKLTRAVRVGTEGFLESMKKRSKTQQPEPVNISTNKIENPLKEIAILSEGRRLSEEKLFITQQRMQKIEELLEKVCSENPLDPNKTKQWMKASIKLSDPSKAIKVKPMKYSPMDREEFDKQIKELLDLKVIKPSKSPHMAPAFLVNNEAEKRRGKKRMVVNYKAMNKATIGDAYNLPNKDELLTLIRGKKIFSSFDCKSGFWQVLLDQESRPLTAFTCPQGHYEWNVVPFGLKQAPSIFQRHMDEAFRVFRKFCCVYVDDILVFSNNEEDHLLHVAMILQKCNQHGIILSKKKAQLFKKKINFLGLEIDEGTHKPQGHILEHINKFPDTLEDKKQLQRFLGILTYASDYIPKLAQIRKPLQAKLKENVPWKWTKEDTLYMQKVKKNLQGFPPLHHPLPEEKLIIETDASDDYWGGMLKAIKINEGTNTELICRYASGSFKAAERNYHSNDKETLAVINTIKKFSIYLTPVHFLIRTDNTHFKSFVNLNYKGDSKLGRNIRWQAWLSHYSFDVEHIKGTDNHFADFLSREFNKVNS

SEQ ID NO: 84 - protein, 488 aa, Artificial Sequence
  Synthetic Polypeptide
MAESILDRTINRFWYNLGEDCLSESQFDLMIRLMEESLDGDQIIDLTSLPSDNLQVEQVMTTTDDSISEESEFLLAIGETSEDESDSGEEPEFEQVRMDRTGGTEIPKKEDGAEPSRYNERKRKTTEDRYFPTQPKTIPGQKQTSMGILNIDCQTNRRTLIDDWAAEIGLIVKTNREDYLDPETILLLMEHKTSGIAKELIRNTRWNRTTGDIIEQVIDAMYTMFLGLNYSDNKVAEKIDEQEKAKIRMTKLQLCDICYLEEFTCDYEKNMYKTELADFPGYINQYLSKIPIIGEKALTRFRHEANGTSIYSLGFAAKIVKEELSKICALSKKQKKLKKFNKKCCSIGEASVEYGCKKTSKKKYHNKRYKKKYKVYKPYKKKKKFRSGKYFKPKEKKGSKQKYCPKGKKDCRCWISNIEGHYANECPNRQSSEKAHILQQAEKLGLQPIEEPYEGVQEVFILEYKEEEEETSTEESDGSSTSEDSDSD

SEQ ID NO: 85 - protein, 488 aa, Artificial Sequence
  Synthetic Polypeptide
MAESILDRTINRFWYNLGEDCLSESQFDLMIRLMEESLSGDQIIDLTSLPSDNLQVEQVMTTTEDSISEESEFLLAIGETSEDESDSGEEPEFEQVRMDRTGGTEIPKEEDGEPSRYNERKRKTTEDRYFPTQPKTIPRQKQTSMGMLNIDCQTNRRTLIDDWAAEIGLIVKTNREDYLNPETILLLMEHKTSGIAKELIRNTRWNRTTGDIIEQVIDRMYTMFLGLNYSDNKVAEKIDEQEKAKIRMTKLQLCDICYLEEFTCDYEKNMYKTELADFPGYINQYLSKIPIIGEKALTRFRHEANGTSIYSLGFERKICKEELSKIRDLSKNEKKLKKFNKKCCSIEEASAEYGCKKTSTKKYHKKRYKKKYKAYKPYKKKKKFRSGKYFKPKEKKGSKQKYCPKGKKDCRCWICNIEGHYANECPNRQSSEKAHILQQAEKVGLQPIEAPYEGVQEVFILEYKEEEEETSTEESDDESSTSEDSDSD

SEQ ID NO: 86 - protein, 159 aa, Artificial Sequence
  Synthetic Polypeptide
MSITGQPHVYKKDTIIRLKPLSLNSNNRSYVFSSSKGNIQNIINHLNNLNEIVGRSLLGIWKINSYFGLSKDPSESKSKNPSVFNTAKTIFKSGGVDYSSQLKEIKSLLEAQNTRIKSLEKAIQSLENKIEPEPLTKEEVKELKESINSIKEGLKNIIG

SEQ ID NO: 87 - protein, 129 aa, Artificial Sequence
  Synthetic Polypeptide
MANLNQIQKEVSEILSDQKSMKADIKAILELLGSQNPIKESLETVAAKIVNDLTKLINDCPCNKEILEALGNQPKEQLIGQPKEKGKGLNLGKYSYPNYGVGNEELGSSGNPKALTWPFKAPAGWPNQY

SEQ ID NO: 88 - protein, 129 aa, Artificial Sequence
  Synthetic Polypeptide
MANLNQIQKEVSEILSDQKSMKSDIKAILELLGSQNPTKESLEAVAAKIVNDLTKLINDCPCNKEILEALGNQPKEQLIEQPKEKGKGLNLGKYSYPNYGVGNEELGSSGNPKALTWPFKAPAGWPNQF

SEQ ID NO: 89 - protein, 159 aa, Artificial Sequence
  Synthetic Polypeptide
MSITGQPHVYKKDTIIRLKPLSLNSNNRSYVFSSSKGNIQNIINHLNNLNKIVGRSLLGIWKINSYFGLSKDPSESKSKNPSVFNTAKTIFKSGGVDYSSQPKEIKSLLEAQNTRIKSLEKAIQSLDEKIEPEPLTKEEVKELKESINSIKEGLKNIIG

SEQ ID NO: 90 - protein, 159 aa, Artificial Sequence
  Synthetic Polypeptide
MRITGQPHVYKKDTIIRLKPLSLNSNNRSYVFSSSKGNIQNIINHLNNLNEIVGRSLLGIWKINSYFGLSKDPSESKSKNPSVFNTAKTIFKSGGVDYSSQLKEIKSLLEAQNTRIKNLEKAIQSLDNKIEPEPLTKKEVKELKESINSIKEGLKNIIG

SEQ ID NO: 91 - protein, 99 aa, Artificial Sequence
  Synthetic Polypeptide
MSITGQPHVYKKDTIIRLKPLSLNSNNRSYVLVPQKGNIQNIINHLNNLNEIVGRSLLGIWKINSYFGLSKDPSESKSKNPSVFNTAKTIFKSGGVDYS

SEQ ID NO: 92 - protein, 679 aa, Artificial Sequence
  Synthetic Polypeptide
MDHLLLKTQTQIEQVMNVTNPNSIYIKGRLYFKGYKKIELHCFVDTGASLCIASKFVIPEEHWVNAERPIMVKIADGSSITISKVCKDIDLIIAGEIFKIPTVYQQESGIDFIIGNNFCQLYEPFIQFTDRVIFTKNKSYPVHITKLTRAVRVGIEGFLESMKKRSKTQQPEPVNISTNKIENPLEEIAILSEGRRLSEEKLFITQQRMQKIEELLEKVCSENPLDPNKTKQWMKASIKLSDPSKAIKVKPMKYSPMDREEFDKQIKELLDLKVIKPSKSPHMAPAFLVNNEAEKRRGKKRMVVNYKAMNKATIGDAYNLPNKDELLTLIRGKKIFSSFDCKSGFWQVLLDQESRPLTAFTCPQGHYEWNVVPFGLKQAPSIFQRHMDEAFRVFRKFCCVYVDDILVFSNNEEDHLLHVAMILQKCNQHGIILSKKKAQLFKKKINFLGLEIDEGTHKPQGHILEHINKFPDTLEDKKQLQRFLGILTYASDYIPKLAQIRKPLQAKLKENVPWKWTKEDTLYMQKVKKNLQGFPPLHHPLPEEKLIIETDASDDYWGGMLKAIKINEGTNTELICRYASGSFKAAERNYHSNDKETLAVINTIKKFSIYLTPVHFLIRTDNTHFKSFVNLNYKGDSKLGRNIRWQAWLSHYSFDVEHIKGTDNHFADFLSREFNKVNS

SEQ ID NO: 93 - protein, 680 aa, Artificial Sequence
  Synthetic Polypeptide
MMNHLLLKTQTQTEQVMNVTNPNSIYIKGRLYFKGYKKIELHCFVDTGASLCIASKFVIPEEHWVNAERPIMVKIADGSSITISKVCKDIDLIIVGVIFKIPTVYQQESGIDFIIGNNFCQLYEPFIQFTDRVIFTKNKSYPVHIAKLTRAVRVGTEGFLESMKKRSKTQQPEPVNISTNKIENPLEEIAILSEGRRLSEEKLFITQQRMQKTEELLEKVCSENPLDPNKTKQWMKASIKLSDPSKAIKVKPMKYSPMDREEFDKQIKELLDLKVIKPSKSPHMAPAFLVNNEAENGRGNKRMVVNYKAMNKATVGDAYNLPNKDELLTLIRGKKIFSSFDCKSGFWQVLLDQESRPLTAFTCPQGHYEWNVVPFGLKQAPSIFQRHMDEAFRVFRKFCCVYVDDIVVFSNNEEDHLLHVAMILQKCNQHGIILSKKKAQLFKKKINFLGLEIDEGTHKPQGHILEHINKFPDTLEDKKQLQRFLGILTYASDYIPNLAQMRQPLQAKLKENVPWKWTKEDTLYMQKVKKNLQGFPPLHHPLPEEKLIIETDASDDYWGGMLKAIKINEGTNTELICRYRSGSFKAAERNYHSNDKETLAVINTIKKFSIYLTPVHFLIRTDNTHFKSFVNLNYKGDSKLGRNIRWQAWLSHYSFDVEHIKGTDNHFADFLSREFNKVNS

SEQ ID NO: 94 - protein, 327 aa, Artificial Sequence
  Synthetic Polypeptide
MDLYPEENTQSEQSQNSENNMQIFKSETSDGFSSDLKISNDQLKNISKTQLTLEKEKIFKMPNVLSQVMKKAFSRKNEILYCVSTKELSVDIHDATGKVYLPLITKEEINKRLSSLKPEVRRTMSMVHLGAVKILLKAQFRNGIDTPIKIALIDDRINSRRDCLLGAAKGNLAYGKFMFTVYPKFGISLNTQRLNQTLSLIHDFENKNLMNKGDKVMTITYIVGYALTNSHHSIDYQSNATIELEDVFQEIGNIQQSEFCTIQNDECNWAIDIAQNKALLGAKTKTQIGNSLQIGNIASSSSTENELARVSQNIDLLKNKLKEICGE

SEQ ID NO: 95 - protein, 327 aa, Artificial Sequence
  Synthetic Polypeptide
MDLYPEENTQSEQSQNSENNMQIFKSENSDGFSSDLMISNDQLKNISKTQLTLEKEKIFKMPNVLSQVMKRAFSRKNEILYCVSTKELSVDIHDATGKVYLPLITREEINKRLSSLKPEVRKTMSMVHLGAVKILLKAQFRNGIDTPIKIALIDDRINSRRDCLLGAAKGNLAYGKFMFTVYPKFGISLNTQRLNQTLSLIHDFENKNLMNKGDKVMTITYMVGYALTNSHHSIDYQSNATIELEDVFQEIGNVHESDFCTIQNDECNWAIDIAQNKALLGAKTKSQIGNNLQIGNSASSSNTENELARVSQNIDLLKNKLKEICGE

SEQ ID NO: 96 - protein, 327 aa, Artificial Sequence
  Synthetic Polypeptide
MDLYPEEKTQSKQSHNSENNMQIFKSENSDGFSSDLMISNDQLKNISKTQLTLEKEKIFKMPNVLSQVMKKAFSRKNEILYCVSTKELSVDIHDATGKVYLPLITKEEINKRLSSLKPEVRKTMSMVHLGAVKILLKAQFRNGIDTPIKIALIDDRINSRRDCLLGAAKGNLAYGKFMFTVYPKFGISLNTQRLNQTLSLIHDFENKNLMNKGDKVMTITYIVGYALTNSHHSIDYQSNATIELEDVFQEIGNVQQCDFCTIQNDECNWAIDIAQNKALLGAKTQSQIGNSLQIGNSASSSNTENELARVSQNIDLLKNKLKEICGE

SEQ ID NO: 97 - protein, 327 aa, Artificial Sequence
  Synthetic Polypeptide
MDLYPEENTQSEQSHNSENNMQIFKSENSDGFSSDLMISNDQLKNISKTQLTLEKEKIFKMPNVLSQVMKKAFSRKNEILYCVSTKELSVDIHDATGKVYLPLITKEEINKRLSSLKPEVRRTMSMVHLGAVKILLKAQFRNGIDTPIKIALIDDRINSRKDCLLGAAKGNLAYGKFMFTVYPKFGISLNTQRLNQTLSLIHDFENKNLMNKGDKVMTITYIVGYALTNSHHSIDYQSNATIELEDVFQEIGNVQQSEFCTIQNDECNWAIDIAQNKALLGAKTKSQIGNSLQIGNSASSSNTENELARVSQNIDLLKNKLKEICGE

SEQ ID NO: 98 - protein, 129 aa, Artificial Sequence
  Synthetic Polypeptide
MANLNQIQKEVSEILSDQKSMKSDIKAILELLGSQNPTKESLEAVAAKIVNDLTKLINDCPCNKEILEALGNQPKEQLIEQPKEKGKGLNLGKYTYPNYGVGNEELGSSGNPKALTWPFKAPAGWPNQF

SEQ ID NO: 99 - protein, 129 aa, Artificial Sequence
  Synthetic Polypeptide
MANLNQIQKEVSEILSDQKSMKSDIKAILEMLGSQNPIKESLEAVAAKIVNDLTKLINDCPCNKEILEALGNQPKEQLIEQPKEKGKGLNLGKYSYPNYGVGNEELGSSGNPKALTWPFKAPAGWPNQF

SEQ ID NO: 100 - protein, 159 aa, Artificial Sequence
  Synthetic Polypeptide
MSITGQPHVYKKDTIIRLKPLSLNSNNRSYVFSSSKGNIQNIINHLNNLNEIVGRSLLGIWKINSYFGLSKDPSESKSKNPSVFNTAKNIFKSRGVDYSSQLKEVKSLLEAQNTRIKNLENAIQSLDNKIEPEPLTKEEVKELKESINSIKEGLKNIIG

SEQ ID NO: 101 - protein, 159 aa, Artificial Sequence
  Synthetic Polypeptide
MSITGQPHVYKKDTIIRLKPLSLNSNNRSYVFSSSKGNIQNIINHLNNLNEIVGRSLLGIWKINSYFGLSKDPSESKSKNPSVFNTAKTIFKSGGVDYSSQLKEIKSLLEAQNTRIKSLENAIQSLDNKIEPEPLTKEEVKELKESINSIKEGLKNIIG

SEQ ID NO: 102 - protein, 159 aa, Artificial Sequence
  Synthetic Polypeptide
MSITGQPHVYKKDTIIRLKPLSLNSNNRSYVFSSSKGNIQNIINHLNNLNEIVGRSLLGIWRINSYFGLSKDPSESKSKNPSVFNTAKTIFKSGGVDYSSQLKEIKSLLEAQNTRIKNLENAIQSLDNKIQPEPLTKEEVKELKESINSIKEALKNIIG

SEQ ID NO: 103 - protein, 9 aa, Artificial Sequence
  Synthetic Polypeptide
NIDLLKNKL

SEQ ID NO: 104 - protein, 9 aa, Artificial Sequence
  Synthetic Polypeptide
LIDDRINSR

SEQ ID NO: 105 - protein, 9 aa, Artificial Sequence
  Synthetic Polypeptide
KILLKAQFR

SEQ ID NO: 106 - protein, 9 aa, Artificial Sequence
  Synthetic Polypeptide
TENELARVS

SEQ ID NO: 107 - protein, 9 aa, Artificial Sequence
  Synthetic Polypeptide
ITKEEINKR

SEQ ID NO: 108 - protein, 9 aa, Artificial Sequence
  Synthetic Polypeptide
NELARVSQN

SEQ ID NO: 109 - protein, 9 aa, Artificial Sequence
  Synthetic Polypeptide
VHLGAVKIL

SEQ ID NO: 110 - protein, 9 aa, Artificial Sequence
  Synthetic Polypeptide
FKMPNVLSQ

SEQ ID NO: 111 - protein, 9 aa, Artificial Sequence
  Synthetic Polypeptide
YPKFGISLN

SEQ ID NO: 112 - protein, 9 aa, Artificial Sequence
  Synthetic Polypeptide
VSQNIDLLK

SEQ ID NO: 113 - protein, 9 aa, Artificial Sequence
  Synthetic Polypeptide
YALTNSHHS

SEQ ID NO: 114 - protein, 9 aa, Artificial Sequence
  Synthetic Polypeptide
YCVSTKELS

SEQ ID NO: 115 - protein, 9 aa, Artificial Sequence
  Synthetic Polypeptide
TENELARVS

SEQ ID NO: 116 - protein, 9 aa, Artificial Sequence
  Synthetic Polypeptide
MVHLGAVKI

SEQ ID NO: 117 - protein, 9 aa, Artificial Sequence
  Synthetic Polypeptide
EVRKTMSMV

SEQ ID NO: 118 - protein, 9 aa, Artificial Sequence
  Synthetic Polypeptide
PFKAPAGWP

SEQ ID NO: 119 - protein, 9 aa, Artificial Sequence
  Synthetic Polypeptide
KIVNDLTKL

SEQ ID NO: 120 - protein, 9 aa, Artificial Sequence
  Synthetic Polypeptide
DIKAILELL

SEQ ID NO: 121 - protein, 9 aa, Artificial Sequence
  Synthetic Polypeptide
SLETVAAKI

SEQ ID NO: 122 - protein, 9 aa, Artificial Sequence
  Synthetic Polypeptide
DLTKLINDC

SEQ ID NO: 123 - protein, 9 aa, Artificial Sequence
  Synthetic Polypeptide
EILEALGTQ

SEQ ID NO: 124 - protein, 9 aa, Artificial Sequence
  Synthetic Polypeptide
FKAPAGWPN

SEQ ID NO: 125 - protein, 9 aa, Artificial Sequence
  Synthetic Polypeptide
GSQNPIKES

SEQ ID NO: 126 - protein, 9 aa, Artificial Sequence
  Synthetic Polypeptide
EALGTQPKE

SEQ ID NO: 127 - protein, 9 aa, Artificial Sequence
  Synthetic Polypeptide
GNPKALTWP

SEQ ID NO: 128 - protein, 9 aa, Artificial Sequence
  Synthetic Polypeptide
PKALTWPFK

SEQ ID NO: 129 - protein, 9 aa, Artificial Sequence
  Synthetic Polypeptide
KGLNLGKYS

SEQ ID NO: 130 - protein, 9 aa, Artificial Sequence
  Synthetic Polypeptide
PFKAPAGWP

SEQ ID NO: 131 - protein, 9 aa, Artificial Sequence
  Synthetic Polypeptide
YPNYGVGNE

SEQ ID NO: 132 - protein, 9 aa, Artificial Sequence
  Synthetic Polypeptide
EALGTQPKE

SEQ ID NO: 133 - protein, 9 aa, Artificial Sequence
  Synthetic Polypeptide
YVDDILVFS

SEQ ID NO: 134 - protein, 9 aa, Artificial Sequence
  Synthetic Polypeptide
FVDTGASLC

SEQ ID NO: 135 - protein, 9 aa, Artificial Sequence
  Synthetic Polypeptide
IIETDASDD

SEQ ID NO: 136 - protein, 9 aa, Artificial Sequence
  Synthetic Polypeptide
FIQFTDRVI

SEQ ID NO: 137 - protein, 9 aa, Artificial Sequence
  Synthetic Polypeptide
DYIPKLAQI

SEQ ID NO: 138 - protein, 9 aa, Artificial Sequence
  Synthetic Polypeptide
VVPFGLKQA

SEQ ID NO: 139 - protein, 9 aa, Artificial Sequence
  Synthetic Polypeptide
VTNPNSIYI

SEQ ID NO: 140 - protein, 9 aa, Artificial Sequence
  Synthetic Polypeptide
PLQAKLKEN

SEQ ID NO: 141 - protein, 9 aa, Artificial Sequence
  Synthetic Polypeptide
HYEWNVVPF

SEQ ID NO: 142 - protein, 9 aa, Artificial Sequence
  Synthetic Polypeptide
NYKGDSKLG

SEQ ID NO: 143 - protein, 9 aa, Artificial Sequence
  Synthetic Polypeptide
YKAMNKATV

SEQ ID NO: 144 - protein, 9 aa, Artificial Sequence
  Synthetic Polypeptide
EQVMNVTNP

SEQ ID NO: 145 - protein, 9 aa, Artificial Sequence
  Synthetic Polypeptide
IAKLTRAVR

SEQ ID NO: 146 - protein, 9 aa, Artificial Sequence
  Synthetic Polypeptide
YPVHIAKLT

SEQ ID NO: 147 - protein, 9 aa, Artificial Sequence
  Synthetic Polypeptide
GKKRMVVNY

SEQ ID NO: 148 - protein, 9 aa, Artificial Sequence
  Synthetic Polypeptide
RLKPLSLNS

SEQ ID NO: 149 - protein, 9 aa, Artificial Sequence
  Synthetic Polypeptide
NIQNIINHL

SEQ ID NO: 150 - protein, 9 aa, Artificial Sequence
  Synthetic Polypeptide
YKKDTIIRL

SEQ ID NO: 151 - protein, 9 aa, Artificial Sequence
  Synthetic Polypeptide
IIRLKPLSL

SEQ ID NO: 152 - protein, 9 aa, Artificial Sequence
  Synthetic Polypeptide
NIINHLNNL

SEQ ID NO: 153 - protein, 9 aa, Artificial Sequence
  Synthetic Polypeptide
KSKNPSVFN

SEQ ID NO: 154 - protein, 9 aa, Artificial Sequence
  Synthetic Polypeptide
IRLKPLSLN

SEQ ID NO: 155 - protein, 9 aa, Artificial Sequence
  Synthetic Polypeptide
EKAIQSLEN

SEQ ID NO: 156 - protein, 9 aa, Artificial Sequence
  Synthetic Polypeptide
YVFSSSKGN

SEQ ID NO: 157 - protein, 9 aa, Artificial Sequence
  Synthetic Polypeptide
QNIINHLNN

SEQ ID NO: 158 - protein, 9 aa, Artificial Sequence
  Synthetic Polypeptide
EAQNTRIKS

SEQ ID NO: 159 - protein, 9 aa, Artificial Sequence
  Synthetic Polypeptide
LNSNNRSYV

SEQ ID NO: 160 - protein, 9 aa, Artificial Sequence
  Synthetic Polypeptide
YKKDTIIRL

SEQ ID NO: 161 - protein, 9 aa, Artificial Sequence
  Synthetic Polypeptide
PLSLNSNNR

SEQ ID NO: 162 - protein, 9 aa, Artificial Sequence
  Synthetic Polypeptide
PEPLTKEEV

SEQ ID NO: 163 - protein, 9 aa, Artificial Sequence
  Synthetic Polypeptide
IIDLTSLPS

SEQ ID NO: 164 - protein, 9 aa, Artificial Sequence
  Synthetic Polypeptide
ILDRTINRF

SEQ ID NO: 165 - protein, 9 aa, Artificial Sequence
  Synthetic Polypeptide
LIDDWAAEI

SEQ ID NO: 166 - protein, 9 aa, Artificial Sequence
  Synthetic Polypeptide
YSLGFAAKI

SEQ ID NO: 167 - protein, 9 aa, Artificial Sequence
  Synthetic Polypeptide
YINQYLSKI

SEQ ID NO: 168 - protein, 9 aa, Artificial Sequence
  Synthetic Polypeptide
MYTMFLGLN

SEQ ID NO: 169 - protein, 9 aa, Artificial Sequence
  Synthetic Polypeptide
KYKAYKPYK

SEQ ID NO: 170 - protein, 9 aa, Artificial Sequence
  Synthetic Polypeptide
AKIRMTKLQ

SEQ ID NO: 171 - protein, 9 aa, Artificial Sequence
  Synthetic Polypeptide
SSEKAHILQ

SEQ ID NO: 172 - protein, 9 aa, Artificial Sequence
  Synthetic Polypeptide
DGEGPSRYN

SEQ ID NO: 173 - protein, 9 aa, Artificial Sequence
  Synthetic Polypeptide
LIRNTRWNR

SEQ ID NO: 174 - protein, 9 aa, Artificial Sequence
  Synthetic Polypeptide
EANGTSIYS

SEQ ID NO: 175 - protein, 9 aa, Artificial Sequence
  Synthetic Polypeptide
KIRMTKLQL

SEQ ID NO: 176 - protein, 9 aa, Artificial Sequence
  Synthetic Polypeptide
EKALTRFRH

SEQ ID NO: 177 - protein, 9 aa, Artificial Sequence
  Synthetic Polypeptide
EQVIDAMYT

SEQ ID NO: 178 - protein, 9 aa, Artificial Sequence
  Synthetic Polypeptide
FAKALTSPP

SEQ ID NO: 179 - protein, 9 aa, Artificial Sequence
  Synthetic Polypeptide
FIQSLLRLN

SEQ ID NO: 180 - protein, 9 aa, Artificial Sequence
  Synthetic Polypeptide
YLYDLVRKF

SEQ ID NO: 181 - protein, 9 aa, Artificial Sequence
  Synthetic Polypeptide
NIKDTVSED

SEQ ID NO: 182 - protein, 9 aa, Artificial Sequence
  Synthetic Polypeptide
NILPKDMNS

SEQ ID NO: 183 - protein, 9 aa, Artificial Sequence
  Synthetic Polypeptide
NPLMANILP

SEQ ID NO: 184 - protein, 9 aa, Artificial Sequence
  Synthetic Polypeptide
VRAKISLAR

SEQ ID NO: 185 - protein, 9 aa, Artificial Sequence
  Synthetic Polypeptide
PKQKAHWLM

SEQ ID NO: 186 - protein, 9 aa, Artificial Sequence
  Synthetic Polypeptide
VSKKVVPTE

SEQ ID NO: 187 - protein, 9 aa, Artificial Sequence
  Synthetic Polypeptide
HTNYYVVYN

SEQ ID NO: 188 - protein, 9 aa, Artificial Sequence
  Synthetic Polypeptide
YVVYNGPHA

SEQ ID NO: 189 - protein, 9 aa, Artificial Sequence
  Synthetic Polypeptide
KKVKDAVKR

SEQ ID NO: 190 - protein, 9 aa, Artificial Sequence
  Synthetic Polypeptide
KVVPTESKA

SEQ ID NO: 191 - protein, 9 aa, Artificial Sequence
  Synthetic Polypeptide
PGVAHKKFA

SEQ ID NO: 192 - protein, 9 aa, Artificial Sequence
  Synthetic Polypeptide
PEKEEAVHS

SEQ ID NO: 193 - protein, 1612 aa, Artificial Sequence
  Synthetic Polypeptide
  misc_feature (1118)..(1118): Xaa can be any naturally occurring amino acid
MAYTQQATNAALASTLRGNNPLVNDLANRRLYESAVEQCNAHDRRPKVNFLRSISEEQTLIATKAYPEFQITFYNTQNAVHSLAGGLRSLELEYLMMQIPYGSTTYDIGGNFAAHMFKGRDYVHCCMPNMDLRDVMRHNAQKDSIELYLSKLAQKKKVIPPYQKPCFDKYTDDPQSVVCSKPFQHCEGVSHCTDKVYAVALHSLYDIPADEFGAALLRRNVHVCYAAFHFSENLLLEDSYVSLDDIGAFFSREGDMLNFSFVAESTLNYTHSYSNVLKYVCKTYFPASSREVYMKEFLVTRVNTWFCKFSRLDTFVLYRGVYHRGVDKEQFYSAMEDAWHYKKTLAMMNSERILLEDSSSVNYWFPKMKDMVIVPLFDVSLQNEGKRLARKEVMVSKDFVYTVLNHIRTYQSKALTYANVLSFVESIRSRVIINGVTARSEWDVDKALLQSLSMTFFLQTKLAMLKDDLVVQKFQVHSKSLTEYVWDEITAAFHNCFPTIKERLINKKLITVSEKALEIKVPDLYVTFHDRLVKEYKSSVEMPVLDVKKSLEEAEVMYNALSEISILKDSDKFDVDVFSRMCNTLGVDPLVAAKVMVAVVSNESGLTLTFERPTEANVALALQPTITSKEEGSLKIVSSDVGESSIKEVVRKSEISMLGLTGNTVSDEFQRSTEIESLQQFHMVSTETIIRKQMHAMVYTGPLKVQQCKNYLDSLVASLSAAVSNLKKIIKDTAAIDLETKEKFGVYDVCLKKWLVKPLSKGHAWGVVMDSDYKCFVALLTYDGENIVCGETWRRVAVSSESLVYSDMGKIRAIRSVLKDGEPHISSAKVTLVDGVPGCGKTKEILSRVNFDEDLVLVPGKQAAEMIRRRANSSGLIVATKENVRTVDSFLMNYGRGPCQYKRLFLDEGLMLHPGCVNFLVGMSLCSEAFVYGDTQQIPYINRVATFPYPKHLSQLEVDAVETRRTTLRCPADITFFLNQKYEGQVMCTSSVTRSVSHEVIQGAAVMNPVSKPLKGKVITFTQSDKSLLLSRGYEDVHTVHEVQGETFEDVSLVRLTPTPVGIISKQSPHLLVSLSRHTRSIKYYTVVLDAVVSVLRDLECVSSYLLDMYKVDVSTQXQLQIESVYKGVNLFVAAPKTGDVSDMQYYYDKCLPGNSTILNEYDAVTMQIRENSLNVKDCVLDMSKSVPLPRESETTLKPVIRTAAEKPRKPGLLENLVAMIKRNFNSPELVGVVDIEDTASLVVDKFFDAYLIKEKKKPKNIPLLSRASLERWIEKQEKSTIGQLADFDFIDLPAVDQYRHMIKQQPKQRLDLSIQTEYPALQTIVYHSKKINALFGPVFSELTRQLLETIDSSRFMFYTRKTPTQIEEFFSDLDSNVPMDILELDISKYDKSQNEFHCAVEYEIWKRLGLDDFLAEVWKHGHRKTTLKDYTAGIKTCLWYQRKSGDVTTFIGNTIIIAACLSSMLPMERLIKGAFCGDDSILYFPKGTDFPDIQQGANLLWNFEAKLFRKRYGYFCGRYIIHHDRGCIVYYDPLKLISKLGAKHIKNREHLEEFRTSLCDVAGSLNNCAYYTHLNDAVGEVIKTAPLGSFVYRALVKYLCDKRLFQTLFLE

SEQ ID NO: 194 - protein, 1117 aa, Artificial Sequence
  Synthetic Polypeptide
MAYTQQATNAALASTLRGNNPLVNDLANRRLYESAVEQCNAHDRRPKVNFLRSISEEQTLIATKAYPEFQITFYNTQNAVHSLAGGLRSLELEYLMMQIPYGSTTYDIGGNFAAHMFKGRDYVHCCMPNMDLRDVMRHNAQKDSIELYLSKLAQKKKVIPPYQKPCFDKYTDDPQSVVCSKPFQHCEGVSHCTDKVYAVALHSLYDIPADEFGAALLRRNVHVCYAAFHFSENLLLEDSYVSLDDIGAFFSREGDMLNFSFVAESTLNYTHSYSNVLKYVCKTYFPASSREVYMKEFLVTRVNTWFCKFSRLDTFVLYRGVYHRGVDKEQFYSAMEDAWHYKKTLAMMNSERILLEDSSSVNYWFPKMKDMVIVPLFDVSLQNEGKRLARKEVMVSKDFVYTVLNHIRTYQSKALTYANVLSFVESIRSRVIINGVTARSEWDVDKALLQSLSMTFFLQTKLAMLKDDLVVQKFQVHSKSLTEYVWDEITAAFHNCFPTIKERLINKKLITVSEKALEIKVPDLYVTFHDRLVKEYKSSVEMPVLDVKKSLEEAEVMYNALSEISILKDSDKFDVDVFSRMCNTLGVDPLVAAKVMVAVVSNESGLTLTFERPTEANVALALQPTITSKEEGSLKIVSSDVGESSIKEVVRKSEISMLGLTGNTVSDEFQRSTEIESLQQFHMVSTETIIRKQMHAMVYTGPLKVQQCKNYLDSLVASLSAAVSNLKKIIKDTAAIDLETKEKFGVYDVCLKKWLVKPLSKGHAWGVVMDSDYKCFVALLTYDGENIVCGETWRRVAVSSESLVYSDMGKIRAIRSVLKDGEPHISSAKVTLVDGVPGCGKTKEILSRVNFDEDLVLVPGKQAAEMIRRRANSSGLIVATKENVRTVDSFLMNYGRGPCQYKRLFLDEGLMLHPGCVNFLVGMSLCSEAFVYGDTQQIPYINRVATFPYPKHLSQLEVDAVETRRTTLRCPADITFFLNQKYEGQVMCTSSVTRSVSHEVIQGAAVMNPVSKPLKGKVITFTQSDKSLLLSRGYEDVHTVHEVQGETFEDVSLVRLTPTPVGIISKQSPHLLVSLSRHTRSIKYYTVVLDAVVSVLRDLECVSSYLLDMYKVDVSTQ

SEQ ID NO: 195 - protein, 257 aa, Artificial Sequence
  Synthetic Polypeptide
MALVVKDDVKISEFINLSAAEKFLPAVMTSVKTVRISKVDKVIAMENDSLSDVNLLKGVKLVKDGYVCLAGLVVSGEWNLPDNCRGGVSVCLVDKRMQRDDEATLGSYRTSAAKKRFAFKLIPNYSITTADAERKVWQVLVNIRGVAMEKGFCPLSLEFVSVCIVHKSNIKLGLREKITSVSEGGPVELTEAVVDEFIESVPMADRLRKFRNQSKKGSNKYVGKRNDNKGLNKEGKLFDKVRIGQNSESSDAESSSF

SEQ ID NO: 196 - protein, 157 aa, Artificial Sequence
  Synthetic Polypeptide
MAYTVSSANQLVYLGSVWADPLELQNLCTSALGNQFQTQQARTTVQQQFSDVWKTIPTATVRFPATGFKVFRYNAVLDSLVSALLGAFDTRNRIIEVENPQNPTTAETLDATRRVDDATVAIRASISNLMNELVRGTGMYNQALFESASGLTWATTP

SEQ ID NO: 197 - protein, 9 aa, Artificial Sequence
  Synthetic Polypeptide
YAVALHSLY

SEQ ID NO: 198 - protein, 9 aa, Artificial Sequence
  Synthetic Polypeptide
FLQTKLAML

SEQ ID NO: 199 - protein, 9 aa, Artificial Sequence
  Synthetic Polypeptide
IIKDTAAID

SEQ ID NO: 200 - protein, 9 aa, Artificial Sequence
  Synthetic Polypeptide
QATNAALAS

SEQ ID NO: 201 - protein, 9 aa, Artificial Sequence
  Synthetic Polypeptide
MIRRRANSS

SEQ ID NO: 202 - protein, 9 aa, Artificial Sequence
  Synthetic Polypeptide
VPLFDVSLQ

SEQ ID NO: 203 - protein, 9 aa, Artificial Sequence
  Synthetic Polypeptide
YTQQATNAA

SEQ ID NO: 204 - protein, 9 aa, Artificial Sequence
  Synthetic Polypeptide
KVMVAVVSN

SEQ ID NO: 205 - protein, 9 aa, Artificial Sequence
  Synthetic Polypeptide
DSLVASLSA

SEQ ID NO: 206 - protein, 9 aa, Artificial Sequence
  Synthetic Polypeptide
QTLIATKAY

SEQ ID NO: 207 - protein, 9 aa, Artificial Sequence
  Synthetic Polypeptide
LIVATKENV

SEQ ID NO: 208 - protein, 9 aa, Artificial Sequence
  Synthetic Polypeptide
GAALLRRNV

SEQ ID NO: 209 - protein, 9 aa, Artificial Sequence
  Synthetic Polypeptide
MPVLDVKKS

SEQ ID NO: 210 - protein, 9 aa, Artificial Sequence
  Synthetic Polypeptide
AKVMVAVVS

SEQ ID NO: 211 - protein, 9 aa, Artificial Sequence
  Synthetic Polypeptide
DAVETRRTT

SEQ ID NO: 212 - protein, 9 aa, Artificial Sequence
  Synthetic Polypeptide
YAVALHSLY

SEQ ID NO: 213 - protein, 9 aa, Artificial Sequence
  Synthetic Polypeptide
FLQTKLAML

SEQ ID NO: 214 - protein, 9 aa, Artificial Sequence
  Synthetic Polypeptide
IIKDTAAID

SEQ ID NO: 215 - protein, 9 aa, Artificial Sequence
  Synthetic Polypeptide
QATNAALAS

SEQ ID NO: 216 - protein, 9 aa, Artificial Sequence
  Synthetic Polypeptide
MIRRRANSS

SEQ ID NO: 217 - protein, 9 aa, Artificial Sequence
  Synthetic Polypeptide
VPLFDVSLQ

SEQ ID NO: 218 - protein, 9 aa, Artificial Sequence
  Synthetic Polypeptide
YTQQATNAA

SEQ ID NO: 219 - protein, 9 aa, Artificial Sequence
  Synthetic Polypeptide
KVMVAVVSN

SEQ ID NO: 220 - protein, 9 aa, Artificial Sequence
  Synthetic Polypeptide
DSLVASLSA

SEQ ID NO: 221 - protein, 9 aa, Artificial Sequence
  Synthetic Polypeptide
QTLIATKAY

SEQ ID NO: 222 - protein, 9 aa, Artificial Sequence
  Synthetic Polypeptide
LIVATKENV

SEQ ID NO: 223 - protein, 9 aa, Artificial Sequence
  Synthetic Polypeptide
GAALLRRNV

SEQ ID NO: 224 - protein, 9 aa, Artificial Sequence
  Synthetic Polypeptide
MPVLDVKKS

SEQ ID NO: 225 - protein, 9 aa, Artificial Sequence
  Synthetic Polypeptide
AKVMVAVVS

SEQ ID NO: 226 - protein, 9 aa, Artificial Sequence
  Synthetic Polypeptide
DAVETRRTT

SEQ ID NO: 227 - protein, 9 aa, Artificial Sequence
  Synthetic Polypeptide
YSITTADAE

SEQ ID NO: 228 - protein, 9 aa, Artificial Sequence
  Synthetic Polypeptide
YRTSAAKKR

SEQ ID NO: 229 - protein, 9 aa, Artificial Sequence
  Synthetic Polypeptide
KISEFINLS

SEQ ID NO: 230 - protein, 9 aa, Artificial Sequence
  Synthetic Polypeptide
FINLSAAEK

SEQ ID NO: 231 - protein, 9 aa, Artificial Sequence
  Synthetic Polypeptide
SYRTSAAKK

SEQ ID NO: 232 - protein, 9 aa, Artificial Sequence
  Synthetic Polypeptide
VCLAGLVVS

SEQ ID NO: 233 - DNA, 28 bp, Artificial Sequence
  Sythetic Oligonucleotide
ggctcgagatgtcttacagtatcactac

SEQ ID NO: 234 - protein, 9 aa, Artificial Sequence
  Synthetic Polypeptide
VHKSNIKLG

SEQ ID NO: 235 - protein, 9 aa, Artificial Sequence
  Synthetic Polypeptide
NLLKGVKLV

SEQ ID NO: 236 - protein, 9 aa, Artificial Sequence
  Synthetic Polypeptide
SGEWNLPDN

SEQ ID NO: 237 - protein, 9 aa, Artificial Sequence
  Synthetic Polypeptide
ERKVWQVLV

SEQ ID NO: 238 - protein, 9 aa, Artificial Sequence
  Synthetic Polypeptide
PAVMTSVKT

SEQ ID NO: 239 - protein, 9 aa, Artificial Sequence
  Synthetic Polypeptide
EKFLPAVMT

SEQ ID NO: 240 - protein, 9 aa, Artificial Sequence
  Synthetic Polypeptide
TSVKTVRIS

SEQ ID NO: 241 - protein, 9 aa, Artificial Sequence
  Synthetic Polypeptide
LPDNCRGGV

SEQ ID NO: 242 - protein, 9 aa, Artificial Sequence
  Synthetic Polypeptide
GPVELTEAV

SEQ ID NO: 243 - protein, 9 aa, Artificial Sequence
  Synthetic Polypeptide
YYDPLKLIS

SEQ ID NO: 244 - protein, 9 aa, Artificial Sequence
  Synthetic Polypeptide
FIDLPAVDQ

SEQ ID NO: 245 - protein, 9 aa, Artificial Sequence
  Synthetic Polypeptide
DIEDTASLV

SEQ ID NO: 246 - protein, 9 aa, Artificial Sequence
  Synthetic Polypeptide
FVYRALVKY

SEQ ID NO: 247 - protein, 9 aa, Artificial Sequence
  Synthetic Polypeptide
FFSDLDSNV

SEQ ID NO: 248 - protein, 9 aa, Artificial Sequence
  Synthetic Polypeptide
VVLDAVVSV

SEQ ID NO: 249 - protein, 9 aa, Artificial Sequence
  Synthetic Polypeptide
VYYDPLKLI

SEQ ID NO: 250 - protein, 9 aa, Artificial Sequence
  Synthetic Polypeptide
VRLTPTPVG

SEQ ID NO: 251 - protein, 9 aa, Artificial Sequence
  Synthetic Polypeptide
VIQGAAVMN

SEQ ID NO: 252 - protein, 9 aa, Artificial Sequence
  Synthetic Polypeptide
WYQRKSGDV

SEQ ID NO: 253 - protein, 9 aa, Artificial Sequence
  Synthetic Polypeptide
TVVLDAVVS

SEQ ID NO: 254 - protein, 9 aa, Artificial Sequence
  Synthetic Polypeptide
KGVNLFVAA

SEQ ID NO: 255 - protein, 9 aa, Artificial Sequence
  Synthetic Polypeptide
QIRENSLNV

SEQ ID NO: 256 - protein, 9 aa, Artificial Sequence
  Synthetic Polypeptide
FIDLPAVDQ

SEQ ID NO: 257 - protein, 9 aa, Artificial Sequence
  Synthetic Polypeptide
FIGNTIIIA

SEQ ID NO: 258 - protein, 9 aa, Artificial Sequence
  Synthetic Polypeptide
YTVSSANQL

SEQ ID NO: 259 - protein, 9 aa, Artificial Sequence
  Synthetic Polypeptide
FRYNAVLDS

SEQ ID NO: 260 - protein, 9 aa, Artificial Sequence
  Synthetic Polypeptide
RRVDDATVA

SEQ ID NO: 261 - protein, 9 aa, Artificial Sequence
  Synthetic Polypeptide
NAVLDSLVS

SEQ ID NO: 262 - protein, 9 aa, Artificial Sequence
  Synthetic Polypeptide
KTIPTATVR

SEQ ID NO: 263 - protein, 9 aa, Artificial Sequence
  Synthetic Polypeptide
VRFPATGFK

SEQ ID NO: 264 - protein, 9 aa, Artificial Sequence
  Synthetic Polypeptide
FRYNAVLDS

SEQ ID NO: 265 - protein, 9 aa, Artificial Sequence
  Synthetic Polypeptide
VYLGSVWAD

SEQ ID NO: 266 - protein, 9 aa, Artificial Sequence
  Synthetic Polypeptide
VAIRASISN

SEQ ID NO: 267 - protein, 9 aa, Artificial Sequence
  Synthetic Polypeptide
VQQQFSDVW

SEQ ID NO: 268 - protein, 9 aa, Artificial Sequence
  Synthetic Polypeptide
IPTATVRFP

SEQ ID NO: 269 - protein, 9 aa, Artificial Sequence
  Synthetic Polypeptide
TLDATRRVD

SEQ ID NO: 270 - protein, 9 aa, Artificial Sequence
  Synthetic Polypeptide
NAVLDSLVS

SEQ ID NO: 271 - protein, 9 aa, Artificial Sequence
  Synthetic Polypeptide
QLVYLGSVW

SEQ ID NO: 272 - protein, 9 aa, Artificial Sequence
  Synthetic Polypeptide
RFPATGFKV

SEQ ID NO: 273 - protein, 202 aa, Artificial Sequence
  Synthetic Polypeptide
MSGIHASQVGPPPASDDRTDRQPSLPLAPRLVESSLAVPYVDVPFQWAVASYAGDSAKFLTDDLSGSSHLSRLTIGYRHAELISAELEFAPLAAAFSKPISVTAVWTIASIAPATTTELQYYGGRLLTLGGPVLMGSVTRIPADLTRLNPVIKTAVGFTDCPRFTYSVYANSGSANTPLITVMVRGVIRLSGPSGNTVTATT

SEQ ID NO: 274 - protein, 2067 aa, Artificial Sequence
  Synthetic Polypeptide
MTTYAFHPLLPTPTSFATVTGGGLKDVIETLSSTIHRDTIAAPLMETLASPYRDSLRDFPWAVPASALPFLQECGITVAGHGFKAHPHPVHKTIETHLLHKVWPHYAQVPSSVLFMKPSKFAKLQRGNANFSALHNYRLTAKDTPRYPNTSTSLPDTETAFMHDALMYYTPAQIVDLFLSCPKLEKLYASLVVPPESSFTSISLHPDLYRFRFDGDRLIYELEGNPAHNYTQPRSALDWLRTTTIRGPGVSLTVSRLDSWGPCHSLLIQRGIPPMHAEHDSISFRGPRAVAIPEPSSLHQDLRHRLVPEDVYNALFLYVRAVRTLRVTDPAGFVRTQCSKSEYAWVTSSAWDNLAHFALLTAPHRPRTSFYLFSSTFQRLEHWVRHHTFLLAGLTTAFALPPSAWLANLVARTSASHIQGLALARRWLITPPHLFRPPSPPSFALLLQRNSTGPILLRGSRLEFEAFPSLAPQLARRFPFLARLLPQKPINPWIVASLAVAVAIPAASLAVRWFFGPDTPQAMHDRYHTMFHPREWRLTLPRGPISCGRSSFSPLPHPPSPTPAPDSRAGPLQPPSALPSTHEPAPADLESPAPQAHAPQTEPPSPVIEQEARPDPFPAPAPRPAPTPSASAPSPAPTPSAPEPPSPTASEQAASLIPAPSSALVVEPSGVVSASSWGATNQPADQVDDSPLARDPSASGPVRFYRDLFPANYAGDSGTFDFRARASGRSPTPYPAMDCLLVATEQATRISREALWDCLTATCPDSFLDPKSIAQHGLSTDHFVILAHRFSLCANFHSAAHVIQLGMADATSTFMINHTAGSAGLPGHFSLRLGDQPRALNGGLAQDLAVAALRFNISGDLLPTRSVHTYRSWPKRAKNLVSNMKNGFDGVMASINPIRPSDAREKIVALDGLLDIAQPRSVRLIHIAGFPGCGKTHPITKLLHTAAFRDFKLAVPTTELRSEWKELMKLSPSQAWRFGTWESSLLKSARILVIDEIYKLPRGYLDLAIHSDSSIEFVIALGDPLQGEYHSTHPSSSNSRLIPEVSHLAPYLDYYCLWSYRVPQDVATFFQVQSHNPALGFARLSKQFPTTGRVLTNSQNSMLTMTQCGYSAVTIASSQGSTYSGATHIHLDRNSSLLSPSNSLVALTRSRTGVFFSGDPALLNGGPNSNLMFSAFFQGKSRHIRDWFPTLFPTATLLLSPLRQRHNRLTGALAPVEPSHLLLPDLPSLLPLPASGPYSRAFPVRSRFAAAVKPFDRSDVLSWAPIAVGDGETNAPRIDTSFLPETRRPLHFDLPSFRPQAPPPPSDPAPSGTAFEPVYPGETFENLVAHFLPAHDPTDREIHWRGQLSNQFPHIDKEYHLAAQPMTLLAPIHDSKHDPTLLAASIQKRLRFRPSASPYRITPRDELLGQLLYESLCRAYHRSPTSTHPFDEALFVECIDLNEFAQLTSKTQAVIMGNARRSDPDWRWSAVRIFSKTQHKVNEGSIFGAWKACQTLALMHDAVVLLLGPVKKYQRVFDARDRPAHLYIHAGQTPSSMSLWCQTHLTPAVKLANDYTAFDQSQHGEAVVLERKKMERLSIPDHLISLHVYLKTHVETQFGPLTCMRLTGEPGTYDDNTDYNLAVINLEYAAAHVPTMVSGDDSLLDFEPPRRPEWVAIEPLLALRFKKERGLYATFCGYYASRVGCVRSPIALFAKLAIAVDDSSISDKLAAYLMEFAVGHSLGDSLWSALPLSAVPFQSACFDFFCRRAPRDLKLALHLGEVPETIIQRLSHLSWLSHAVYSLLPSRLRLAILHSSRQHRSLPEDPAVSSLQGELLHTFHAPMPSPPSLPLFGGLSPDNILTPHEFRTALYESSAYPTPPNSPTSMSGIHASQVGPPPASDDRTDRQPSLPLAPRLVESSLAVPYVDVPFQWAVASYAGDSAKFLTDDLSGSSHLSRLTIGYRHAELISAELEFAPLAAAFSKPISVTAVWTIASIAPATTTELQYYGGRLLTLGGPVLMGSVTRIPADLTRLNPVIKTAVGFTDCPRFTYSVYANSGSANTPLITVMVRGVIRLSGPSGNTVTATT

SEQ ID NO: 275 - protein, 622 aa, Artificial Sequence
  Synthetic Polypeptide
LAPAQPSHLLLPDLPSLPPLPASGPYSRSFPVRSRFAAAVKPSDRSDVLSWAPIAVGDGETNAPRIDTSFLPETRRPLHFDLPSFRPQAPPPPSDPAPSGTAFEPVYPGETFENLVAHFLPAHDPTDREIHWRRQLSNQFPHVDKEYHLAAQPMTLLAPIHDSKHDPTLLAASIQKRLRFRPSASPYRISPRDELLGQLLYESLCRAYHRSPTTTHPFDEALFVECIDLNEFAQLTSKTQAVIMGNARRSDPDWRWSAVRIFSKTQHKVNEGSIFGAWKACQTLALMHDAVVLLLGPVKKYQRVFDARDRPAHLYIHAGQTPSSMSLWCQTHLTPAVKLANDYTAFDQSQHGEAVVLERKKMERLSIPDHLISLHVHLKTHVETQFGPLTCMRLTGEPGTYDDNTDYNLAVINLEYAAAHVPTMVSGDDSLLDFEPPRRPEWVAIEPLLALRFKKERGLYATFCGYYASRVGCVRSPIALFAKLAIAVDDSSISDKLAAYLMEFAVGHSLGDSLWSALPLSAVPFQSACFDFFCRRAPRDLKLALHLGEVPETIIQRLSHLSWLSHAVYSLLPSRLRLAILHSSRQHRSLPEDPAVSSLQGELLQTFHAPMPSLPSLPLFGG

SEQ ID NO: 276 - protein, 1212 aa, Artificial Sequence
  Synthetic Polypeptide
MTTYAFHPLLPTPTSFATITGGGLKDVIETLSSTIHRDTIAAPLMETLASPYRDSLRDFPWAVPASALPFLQECGITVAGHGFKAHPHPVHKTIETHLLHKVWPHYAQVPSSVLFMKPSKFAKLQRGNANFSALHNYRLTAKDTPRYPNTSTSLPDTETAFMHDALMYYTPAQIVDLFLSCPKLEKLYASLVVPPESSFTSISLHPDLYRFRFDGDRLIYELEGNPAHNYTQPRSALDWLRTTTIRGPGVSLTVSRLDSWGPCHSLLIQRGIPPMHAEHDSISFRGPRAVAIPEPSSLHQDLRHRLVPEDVYNALFLYVRAVRTLRVTDPAGFVRTQCSKPEYAWVTSSAWDNLAHFALLTAPHRPRTSFYLFSSTFQRLEHWVRHHTFLLAGLTTAFALPPSAWLANLVARASASHIQGLALARRWLITPPHLFRPPPPPSFALLLQRNSTGPVLLRGSRLEFEAFPSLAPQLARRFPFLARLLPQKPIDPWVVASLAVAVAIPAASLAVRWFFGPDTPQAMHDRYHTMFHPREWRLTLPRGPISCGRSSFSPLPHPPSPTPAPDSRAEPLQPPSAPPSTHEPAPADLEPQAPPAHAPQTEPPSPVIEQEARPNPLPAPAPLSAPTPSASAPSLAPTPSAPEPPSPTASEQAASLIPAPSSALVVEPSGVVSASSWGATNQPADQVDDSPLARDPSASGPVRFYRDLFPANYAGDSGTFDFRARASGRSPTPYPAMDCLLVATEQATRISREALWDCLTATCPDSFLDPKSIAQHGLSTDHFVILAHRFSLCANFHSAEHVIQLGMADATSIFMINHTAGSAGLPGHFSLRLGDQPRALNGGLAQDLAVAALRFNISGDLLPTRSVHTYRSWPKRAKNLVSNMKNGFDGVMASINPIRPSDAREKIVALDGLLDIARPRSVRLIHIAGFPGCGKTHPITKLLHTAAFRDFKLAVPTTELRSEWKELMKLSPSQAWRFGTWESSLLKSARILVIDEIYKLPRGYLDLAIHSDSSIEFVIALGDPLQGEYHSTHPSSSNSRLIPEVSHLAPYLDYYCLWSYRVPQDVAAFFQVQSHNPALGFARLSKQFPTTGRVLTNSQNSMLTMTQCGYSAVTIASSQGSTYSGATHIHLDRNSSLLSPSNSLVALTRSRTGVFFSGDPALLNGGPNSNLMFSAFFQGKSRHIRAWFPTLFPTATLLFSPLRQRHNRLTGA

SEQ ID NO: 277 - protein, 9 aa, Artificial Sequence
  Synthetic Polypeptide
FLTDDLSGS

SEQ ID NO: 278 - protein, 9 aa, Artificial Sequence
  Synthetic Polypeptide
PADLTRLNP

SEQ ID NO: 279 - protein, 9 aa, Artificial Sequence
  Synthetic Polypeptide
FAPLAAAFS

SEQ ID NO: 280 - protein, 9 aa, Artificial Sequence
  Synthetic Polypeptide
PATTTELQY

SEQ ID NO: 281 - protein, 9 aa, Artificial Sequence
  Synthetic Polypeptide
FQWAVASYA

SEQ ID NO: 282 - protein, 9 aa, Artificial Sequence
  Synthetic Polypeptide
PVLMGSVTR

SEQ ID NO: 283 - protein, 9 aa, Artificial Sequence
  Synthetic Polypeptide
SGSANTPLI

SEQ ID NO: 284 - protein, 9 aa, Artificial Sequence
  Synthetic Polypeptide
SVYANSGSA

SEQ ID NO: 285 - protein, 9 aa, Artificial Sequence
  Synthetic Polypeptide
VWTIASIAP

SEQ ID NO: 286 - protein, 9 aa, Artificial Sequence
  Synthetic Polypeptide
VIKTAVGFT

SEQ ID NO: 287 - protein, 9 aa, Artificial Sequence
  Synthetic Polypeptide
PISVTAVWT

SEQ ID NO: 288 - protein, 9 aa, Artificial Sequence
  Synthetic Polypeptide
PADLTRLNP

SEQ ID NO: 289 - protein, 9 aa, Artificial Sequence
  Synthetic Polypeptide
PVIKTAVGF

SEQ ID NO: 290 - protein, 9 aa, Artificial Sequence
  Synthetic Polypeptide
FQWAVASYA

SEQ ID NO: 291 - protein, 9 aa, Artificial Sequence
  Synthetic Polypeptide
GPVLMGSVT

SEQ ID NO: 292 - protein, 9 aa, Artificial Sequence
  Synthetic Polypeptide
YYTPAQIVD

SEQ ID NO: 293 - protein, 9 aa, Artificial Sequence
  Synthetic Polypeptide
FRDFKLAVP

SEQ ID NO: 294 - protein, 9 aa, Artificial Sequence
  Synthetic Polypeptide
HIQGLALAR

SEQ ID NO: 295 - protein, 9 aa, Artificial Sequence
  Synthetic Polypeptide
FALLLQRNS

SEQ ID NO: 296 - protein, 9 aa, Artificial Sequence
  Synthetic Polypeptide
HRDTIAAPL

SEQ ID NO: 297 - protein, 9 aa, Artificial Sequence
  Synthetic Polypeptide
SEQAASLIP

SEQ ID NO: 298 - protein, 9 aa, Artificial Sequence
  Synthetic Polypeptide
AWLANLVAR

SEQ ID NO: 299 - protein, 9 aa, Artificial Sequence
  Synthetic Polypeptide
AIPAASLAV

SEQ ID NO: 300 - protein, 9 aa, Artificial Sequence
  Synthetic Polypeptide
FEAFPSLAP

SEQ ID NO: 301 - protein, 9 aa, Artificial Sequence
  Synthetic Polypeptide
PRPAPTPSA

SEQ ID NO: 302 - protein, 9 aa, Artificial Sequence
  Synthetic Polypeptide
LAVAVAIPA

SEQ ID NO: 303 - protein, 9 aa, Artificial Sequence
  Synthetic Polypeptide
KPINPWIVA

SEQ ID NO: 304 - protein, 9 aa, Artificial Sequence
  Synthetic Polypeptide
FALLTAPHR

SEQ ID NO: 305 - protein, 9 aa, Artificial Sequence
  Synthetic Polypeptide
FAKLQRGNA

SEQ ID NO: 306 - protein, 9 aa, Artificial Sequence
  Synthetic Polypeptide
LANLVARTS

SEQ ID NO: 307 - protein, 9 aa, Artificial Sequence
  Synthetic Polypeptide
YYTPAQIVD

SEQ ID NO: 308 - protein, 9 aa, Artificial Sequence
  Synthetic Polypeptide
FRDFKLAVP

SEQ ID NO: 309 - protein, 9 aa, Artificial Sequence
  Synthetic Polypeptide
HIQGLALAR

SEQ ID NO: 310 - protein, 9 aa, Artificial Sequence
  Synthetic Polypeptide
FALLLQRNS

SEQ ID NO: 311 - protein, 9 aa, Artificial Sequence
  Synthetic Polypeptide
NLVARASAS

SEQ ID NO: 312 - protein, 9 aa, Artificial Sequence
  Synthetic Polypeptide
PSLAPTPSA

SEQ ID NO: 313 - protein, 9 aa, Artificial Sequence
  Synthetic Polypeptide
SEQAASLIP

SEQ ID NO: 314 - protein, 9 aa, Artificial Sequence
  Synthetic Polypeptide
AWLANLVAR

SEQ ID NO: 315 - protein, 9 aa, Artificial Sequence
  Synthetic Polypeptide
VRTQCSKPE

SEQ ID NO: 316 - protein, 9 aa, Artificial Sequence
  Synthetic Polypeptide
AIPAASLAV

SEQ ID NO: 317 - protein, 9 aa, Artificial Sequence
  Synthetic Polypeptide
LAVAVAIPA

SEQ ID NO: 318 - protein, 9 aa, Artificial Sequence
  Synthetic Polypeptide
FALLTAPHR

SEQ ID NO: 319 - protein, 9 aa, Artificial Sequence
  Synthetic Polypeptide
FAKLQRGNA

SEQ ID NO: 320 - protein, 9 aa, Artificial Sequence
  Synthetic Polypeptide
KPIDPWVVA

SEQ ID NO: 321 - protein, 9 aa, Artificial Sequence
  Synthetic Polypeptide
LAQDLAVAA

SEQ ID NO: 322 - protein, 9 aa, Artificial Sequence
  Synthetic Polypeptide
RFRPSASPY

SEQ ID NO: 323 - protein, 9 aa, Artificial Sequence
  Synthetic Polypeptide
SISDKLAAY

SEQ ID NO: 324 - protein, 9 aa, Artificial Sequence
  Synthetic Polypeptide
EYHLAAQPM

SEQ ID NO: 325 - protein, 9 aa, Artificial Sequence
  Synthetic Polypeptide
PAVKLANDY

SEQ ID NO: 326 - protein, 9 aa, Artificial Sequence
  Synthetic Polypeptide
YIHAGQTPS

SEQ ID NO: 327 - protein, 9 aa, Artificial Sequence
  Synthetic Polypeptide
YHLAAQPMT

SEQ ID NO: 328 - protein, 9 aa, Artificial Sequence
  Synthetic Polypeptide
FRPSASPYR

SEQ ID NO: 329 - protein, 9 aa, Artificial Sequence
  Synthetic Polypeptide
PSLPPLPAS

SEQ ID NO: 330 - protein, 9 aa, Artificial Sequence
  Synthetic Polypeptide
DKLAAYLME

SEQ ID NO: 331 - protein, 9 aa, Artificial Sequence
  Synthetic Polypeptide
FRPQAPPPP

SEQ ID NO: 332 - protein, 9 aa, Artificial Sequence
  Synthetic Polypeptide
YPGETFENL

SEQ ID NO: 333 - protein, 9 aa, Artificial Sequence
  Synthetic Polypeptide
RWSAVRIFS

SEQ ID NO: 334 - protein, 9 aa, Artificial Sequence
  Synthetic Polypeptide
PAVKLANDY

SEQ ID NO: 335 - protein, 9 aa, Artificial Sequence
  Synthetic Polypeptide
YAAAHVPTM

SEQ ID NO: 336 - protein, 9 aa, Artificial Sequence
  Synthetic Polypeptide
FPVRSRFAA

SEQ ID NO: 337 - protein, 9 aa, Artificial Sequence
  Synthetic Polypeptide
FPTATLLLS

SEQ ID NO: 338 - protein, 9 aa, Artificial Sequence
  Synthetic Polypeptide
FLTDDLSGS

SEQ ID NO: 339 - protein, 9 aa, Artificial Sequence
  Synthetic Polypeptide
TATLLLSPL

SEQ ID NO: 340 - protein, 9 aa, Artificial Sequence
  Synthetic Polypeptide
FAPLAAAFS

SEQ ID NO: 341 - protein, 9 aa, Artificial Sequence
  Synthetic Polypeptide
PATTTELQY

SEQ ID NO: 342 - protein, 9 aa, Artificial Sequence
  Synthetic Polypeptide
YHLAAQPMT

SEQ ID NO: 343 - protein, 9 aa, Artificial Sequence
  Synthetic Polypeptide
FRPSASPYR

SEQ ID NO: 344 - DNA, 28 bp, Artificial Sequence
  Sythetic Oligonucleotide
ccggatcctgggcccctaccgggggtaa

SEQ ID NO: 345 - protein, 9 aa, Artificial Sequence
  Synthetic Polypeptide
VYLKTHVET

SEQ ID NO: 346 - protein, 9 aa, Artificial Sequence
  Synthetic Polypeptide
DKLAAYLME

SEQ ID NO: 347 - protein, 9 aa, Artificial Sequence
  Synthetic Polypeptide
FRPQAPPPP

SEQ ID NO: 348 - protein, 9 aa, Artificial Sequence
  Synthetic Polypeptide
PISVTAVWT

SEQ ID NO: 349 - protein, 9 aa, Artificial Sequence
  Synthetic Polypeptide
EVSHLAPYL

SEQ ID NO: 350 - protein, 9 aa, Artificial Sequence
  Synthetic Polypeptide
YPGETFENL

SEQ ID NO: 351 - protein, 9 aa, Artificial Sequence
  Synthetic Polypeptide
RWSAVRIFS

SEQ ID NO: 352 - protein, 9 aa, Artificial Sequence
  Synthetic Polypeptide
PAVKLANDY

SEQ ID NO: 353 - protein, 9 aa, Artificial Sequence
  Synthetic Polypeptide
FPTATLLFS

SEQ ID NO: 354 - protein, 9 aa, Artificial Sequence
  Synthetic Polypeptide
GYLDLAIHS

SEQ ID NO: 355 - protein, 9 aa, Artificial Sequence
  Synthetic Polypeptide
HIHLDRNSS

SEQ ID NO: 356 - protein, 9 aa, Artificial Sequence
  Synthetic Polypeptide
RNSSLLSPS

SEQ ID NO: 357 - protein, 9 aa, Artificial Sequence
  Synthetic Polypeptide
TATLLFSPL

SEQ ID NO: 358 - protein, 9 aa, Artificial Sequence
  Synthetic Polypeptide
RVLTNSQNS

SEQ ID NO: 359 - protein, 9 aa, Artificial Sequence
  Synthetic Polypeptide
SHLAPYLDY

SEQ ID NO: 360 - protein, 9 aa, Artificial Sequence
  Synthetic Polypeptide
TNSQNSMLT

SEQ ID NO: 361 - protein, 9 aa, Artificial Sequence
  Synthetic Polypeptide
FPTATLLFS

SEQ ID NO: 362 - protein, 9 aa, Artificial Sequence
  Synthetic Polypeptide
SRLIPEVSH

SEQ ID NO: 363 - protein, 9 aa, Artificial Sequence
  Synthetic Polypeptide
EVSHLAPYL

SEQ ID NO: 364 - protein, 9 aa, Artificial Sequence
  Synthetic Polypeptide
GYLDLAIHS

SEQ ID NO: 365 - protein, 9 aa, Artificial Sequence
  Synthetic Polypeptide
YSGATHIHL

SEQ ID NO: 366 - protein, 9 aa, Artificial Sequence
  Synthetic Polypeptide
YRVPQDVAA

SEQ ID NO: 367 - protein, 9 aa, Artificial Sequence
  Synthetic Polypeptide
TRSRTGVFF

SEQ ID NO: 368 - protein, 2867 aa, Artificial Sequence
  Synthetic Polypeptide
MNTNCQFSNISYLHNMNNEIVGVERFKYNDVEYDINGSLVDCFYKGAETIPTPSPNLKCFFNALCLCLRVESKDYIKVMNKLRNQYYAMSIWTASELKELLRELDPNDSYMATYYSIIHVSICLDICICIHDETWDSHCKTFGDRSKLMIHMKLESRHYEAIDDPTYDYFELSSVLGGYLGSLDDDIDLPSMIELKVETKPLGDVFTERGQWYNSLASLAESNLHQQVPQFNCNLFSSIVRLKKYSRQQEVAMLSLNLGMTIEVRLLSYHENLYSLEGGFKCVGPGNGLLELIYDGSTNKWFFLKISGLLEVDQNYQVLEKVHDLESLIRQLTQSFVQPSNWYSNKLKMIEKCKTIFPQRREVDYEPFLNKNKLLSLCFLSKELENLLTILLVDNDMVNVGTILKPKIYKYWGQNPELTKKQKHFLLDSEGNLWGAVKSGLPVTVLRDDQYDKDFPTLSFSRKTAEFLFTSYDDDIQKLTNPEHSGYDESMYGLYEMHPRLKVPETSEIVSPDETEIVISFENRFGNRKYHDFPSIPDNRAYSCKISTVKNIVHDFTFALFGDDLDVSFTDAGLFIPGDPDNNKTPDMIIKHGEKHYSVIEFTTRNTNMRPDVRSRGWEDKTLKYRDAIHNRRDHFKISIDYYIIVVCQNGVQTNLMNLPTETMDELIYRYKLARQIALQIEQNLEYDIKADQAMKMEISSIKKIIEGIRIHKEDGELDPSKFIKPYTMAHYTKAVGTLESEDYDYLHKLDTYVSNKSMRKMEKLKHLNDVNIRAYRDEIRNESILMMQSRKMEYESNFIKNEEAYRTSNEASVQLPMLVPKIVRVVGVSNTHEEVRNVVDEIISTSSMSSTEEAWKQGICGFMHYLYEIEDGKSDFSLAMEEPTLSTQMEDDLKKIRNKFNRISMVFDMDDRIDLAKIGINGKKYSKDPEVLAYRNESKKPFSLFTSTDDIERFINEECLQLFTPHDQELDNSVLDLISDSLKIHGCSSQSRLLESLDTYLKSKAYLFTKFVSDLAVELSISVKQNCQPREFIVKRLRDFQVYVLIKSTGSDGKVFFSLLFREDQELSKIINTTFKKVSKLGDRFLYTDFISVNYSKLVNWTRCESLMLSLYAFWREQYNIPPNIGISSIPDEDFNSDYLKMWANCLLVLLNDKHQTEEVITSTRFIHMEAFVETPNWPKPHKMFEKLSTIPRSRLEVFYIKSAIKLMECYTETPIRLDNSGPMRRWYNIKNPFVTENGSLSNFPNHDVMLSSMYLGYLKNKDEDPEDNASGQLISKILGYEDKLPRGEDKKYLGLEDPPVDQCSTHMYSISLVKRMCDSFLGRLKSETGVSDPKDYLSTLCLEYLSHEFLESFVTLKASSNFSAEYYEYRPNENKRSRPQTVNEDLPKSESNRRNYGRSKVIEKIQTILTKKDPNEKYRLVVDLLKESLEEVEKNACLHVCIFRKNQHGGLREIYVLNIYERIVQKCVEDLARAILSVVPSETMTHPKNKFQIPNKHNIAARKEFGDSYFTVCTSDDASKWNQGHHVSKFITILVRILPKFWHGFIVRALQLWFHKRLFLGDDLLRLFCANDVLNTTDEKVKKVHEVFKGREVAPWMTRGMTYIETESGFMQGILHYISSLFHAIFLEDLAERQKKQLPQMARIIQPDNESNVIIDCMESSDDSSMMISFSTKSMNDRQTFAMLLLVDRAFSLKEYYGDMLGIYKSIKSTTGTIFMMEFNIEFFFAGDTHRPTIRWVNAALNVSEQETLIASQEEMSNTLKDILEGGGTFYHTFVTQVAQAMLHYRMYGSSVSPLWGSYCSMIKLSKDPALGYFLMDHPMASGLMGFGYNLWKTCKQSFLSVKYADMLNLEFNTENSKRKMTPDIANLGVLSRTTTVGFGNKTKWMKMCDRMHLTDDIFDSIEQNPRILFFHAKNAEEMQQKIAIKMRSPGVMQSLAKTNTLGRRVASSVYFISRNVLFSMSAGVETDEKRKTSIFRELLNSNSNVVSKIGQKEAQIPGVQSLTEEPSDDFYSVEGLREGVIKMVSVLTDLTMEQSERLLSEKFGLTLDDTKLNDWFIDENKLMHKLSKGFGINIHVYISRDPEASFKLCHTFKCLTNSENLYFMLNPNYLLVRRQESSSMSDEHRRQIQYSVAKFIWFGEKDVPAHPKTLKIVWKKYKETWLWLRDTIGDTLVGSPFVSYIQLNNYLSRVSTKGRVLHFVGTMGKASSGNVNLMTLIRNNFSNGIVFSGGFTDVIKKEKTEDYKSLLSNLTMLNQSPLKYEEKLVAMTDLIVDNKDLEYSTSMLGSKRNKLAIIQMFLRTDPDLKFSGDYNTQDAVNLVEHHLGEFDQNLSLGGFRSLIRMGQLVEKELLDSGMGYEELEKNFEDLTINSLSASARRAYCQYIYCDRVLEDAYQQYNKRKPTQKMLLSLELLKAEAANDPTRNWLTMIGHRIVKSSYDLMKLRDEAKYCRRDIMEKIRIGNLGLLGGYVQKQSYNREEKKYFGPGVWRGYLHDVAVQIEVNSDQNMESYIKSVSLSSAMHLSDTIQSLKEWSREHRVGNSHYTMAYGNRDCEMLGRMFEFRRVQMSDRDGCPIVLDPKLIIHQPFLSDSFCIDITDHSIRLLQECTGERAPYTTVLTVHLSKKDVITSELQSQQNVNMIKRLKMDDWLKDWILWRDQRAPTSLFTQMNLGQFPDLVDEKRLKSWCRELFESSLGYQKIVQLSKLSKAARDRLAHDYPESIQEDKEVCEELESMESLLTRISQAYKTIDMTIKDEDLEHLYELARDLAEEQDEIQMEKEAVNVSLFHKMFLSSVRKMDTFMGTDDLRLTMNIIKGESRQKLPASSMHYKRILQFMYDVPDSQFPTYNPPSSRGRGRRGRGRSYMF

SEQ ID NO: 369 - protein, 166 aa, Artificial Sequence
  Synthetic Polypeptide
MGYYHSKTDNPKLITTKIRKYKVFSIPVKTQVIIITGSTLSLDFFTLQTWIHLQEGFILEMGVRSTNGVLKIVNTICQENGKIERDRWDWYGCADSGLRKVHYDEGIARSERTSIRVDIRGTLFVLTVDGHILGVYDVNSCINAINIGLEVLPNSDNTLDFDLIYH

SEQ ID NO: 370 - protein, 9 aa, Artificial Sequence
  Synthetic Polypeptide
WYNSLASLA

SEQ ID NO: 371 - protein, 9 aa, Artificial Sequence
  Synthetic Polypeptide
YRDAIHNRR

SEQ ID NO: 372 - protein, 9 aa, Artificial Sequence
  Synthetic Polypeptide
YRDEIRNES

SEQ ID NO: 373 - protein, 9 aa, Artificial Sequence
  Synthetic Polypeptide
ILKPKIYKY

SEQ ID NO: 374 - protein, 9 aa, Artificial Sequence
  Synthetic Polypeptide
EYDIKADQA

SEQ ID NO: 375 - protein, 9 aa, Artificial Sequence
  Synthetic Polypeptide
TNLMNLPTE

SEQ ID NO: 376 - protein, 9 aa, Artificial Sequence
  Synthetic Polypeptide
QELDNSVLD

SEQ ID NO: 377 - protein, 9 aa, Artificial Sequence
  Synthetic Polypeptide
VPQFNCNLF

SEQ ID NO: 378 - protein, 9 aa, Artificial Sequence
  Synthetic Polypeptide
ASLAESNLH

SEQ ID NO: 379 - protein, 9 aa, Artificial Sequence
  Synthetic Polypeptide
VGPGNGLLE

SEQ ID NO: 380 - protein, 9 aa, Artificial Sequence
  Synthetic Polypeptide
KIVRVVGVS

SEQ ID NO: 381 - protein, 9 aa, Artificial Sequence
  Synthetic Polypeptide
YQVLEKVHD

SEQ ID NO: 382 - protein, 9 aa, Artificial Sequence
  Synthetic Polypeptide
EEVRNVVDE

SEQ ID NO: 383 - protein, 9 aa, Artificial Sequence
  Synthetic Polypeptide
PKIVRVVGV

SEQ ID NO: 384 - protein, 9 aa, Artificial Sequence
  Synthetic Polypeptide
LKHLNDVNI

SEQ ID NO: 385 - protein, 9 aa, Artificial Sequence
  Synthetic Polypeptide
DYKSLLSNL

SEQ ID NO: 386 - protein, 9 aa, Artificial Sequence
  Synthetic Polypeptide
FEDLTINSL

SEQ ID NO: 387 - protein, 9 aa, Artificial Sequence
  Synthetic Polypeptide
YNTQDAVNL

SEQ ID NO: 388 - protein, 9 aa, Artificial Sequence
  Synthetic Polypeptide
KYKETWLWL

SEQ ID NO: 389 - protein, 9 aa, Artificial Sequence
  Synthetic Polypeptide
YIKSVSLSS

SEQ ID NO: 390 - protein, 9 aa, Artificial Sequence
  Synthetic Polypeptide
VIKMVSVLT

SEQ ID NO: 391 - protein, 9 aa, Artificial Sequence
  Synthetic Polypeptide
VNLMTLIRN

SEQ ID NO: 392 - protein, 9 aa, Artificial Sequence
  Synthetic Polypeptide
QKLPASSMH

SEQ ID NO: 393 - protein, 9 aa, Artificial Sequence
  Synthetic Polypeptide
QSQQNVNMI

SEQ ID NO: 394 - protein, 9 aa, Artificial Sequence
  Synthetic Polypeptide
TMLNQSPLK

SEQ ID NO: 395 - protein, 9 aa, Artificial Sequence
  Synthetic Polypeptide
HPKTLKIVW

SEQ ID NO: 396 - protein, 9 aa, Artificial Sequence
  Synthetic Polypeptide
HFVGTMGKA

SEQ ID NO: 397 - protein, 9 aa, Artificial Sequence
  Synthetic Polypeptide
TTVLTVHLS

SEQ ID NO: 398 - protein, 9 aa, Artificial Sequence
  Synthetic Polypeptide
KIVQLSKLS

SEQ ID NO: 399 - protein, 9 aa, Artificial Sequence
  Synthetic Polypeptide
VAVQIEVNS

SEQ ID NO: 400 - protein, 9 aa, Artificial Sequence
  Synthetic Polypeptide
YLKMWANCL

SEQ ID NO: 401 - protein, 9 aa, Artificial Sequence
  Synthetic Polypeptide
YLKSKAYLF

SEQ ID NO: 402 - protein, 9 aa, Artificial Sequence
  Synthetic Polypeptide
FVSDLAVEL

SEQ ID NO: 403 - protein, 9 aa, Artificial Sequence
  Synthetic Polypeptide
YLSTLCLEY

SEQ ID NO: 404 - protein, 9 aa, Artificial Sequence
  Synthetic Polypeptide
FVTLKASSN

SEQ ID NO: 405 - protein, 9 aa, Artificial Sequence
  Synthetic Polypeptide
DHPMASGLM

SEQ ID NO: 406 - protein, 9 aa, Artificial Sequence
  Synthetic Polypeptide
VELSISVKQ

SEQ ID NO: 407 - protein, 9 aa, Artificial Sequence
  Synthetic Polypeptide
VTLKASSNF

SEQ ID NO: 408 - protein, 9 aa, Artificial Sequence
  Synthetic Polypeptide
WVNAALNVS

SEQ ID NO: 409 - protein, 9 aa, Artificial Sequence
  Synthetic Polypeptide
DYLSTLCLE

SEQ ID NO: 410 - protein, 9 aa, Artificial Sequence
  Synthetic Polypeptide
LAVELSISV

SEQ ID NO: 411 - protein, 9 aa, Artificial Sequence
  Synthetic Polypeptide
KQSFLSVKY

SEQ ID NO: 412 - protein, 9 aa, Artificial Sequence
  Synthetic Polypeptide
FVSDLAVEL

SEQ ID NO: 413 - protein, 9 aa, Artificial Sequence
  Synthetic Polypeptide
PRSRLEVFY

SEQ ID NO: 414 - protein, 9 aa, Artificial Sequence
  Synthetic Polypeptide
FISRNVLFS

SEQ ID NO: 415 - protein, 9 aa, Artificial Sequence
  Synthetic Polypeptide
LITTKIRKY

SEQ ID NO: 416 - protein, 9 aa, Artificial Sequence
  Synthetic Polypeptide
YYHSKTDNP

SEQ ID NO: 417 - protein, 9 aa, Artificial Sequence
  Synthetic Polypeptide
HYDEGIARS

SEQ ID NO: 418 - protein, 9 aa, Artificial Sequence
  Synthetic Polypeptide
KIVNTICQE

SEQ ID NO: 419 - protein, 9 aa, Artificial Sequence
  Synthetic Polypeptide
KYKVFSIPV

SEQ ID NO: 420 - protein, 9 aa, Artificial Sequence
  Synthetic Polypeptide
EVLPNSDNT

SEQ ID NO: 421 - protein, 9 aa, Artificial Sequence
  Synthetic Polypeptide
VRSTNGVLK

SEQ ID NO: 422 - protein, 9 aa, Artificial Sequence
  Synthetic Polypeptide
YGCADSGLR

SEQ ID NO: 423 - protein, 9 aa, Artificial Sequence
  Synthetic Polypeptide
VYDVNSCIN

SEQ ID NO: 424 - protein, 9 aa, Artificial Sequence
  Synthetic Polypeptide
GVLKIVNTI

SEQ ID NO: 425 - protein, 9 aa, Artificial Sequence
  Synthetic Polypeptide
YDVNSCINA

SEQ ID NO: 426 - protein, 9 aa, Artificial Sequence
  Synthetic Polypeptide
KIVNTICQE

SEQ ID NO: 427 - protein, 9 aa, Artificial Sequence
  Synthetic Polypeptide
LFVLTVDGH

SEQ ID NO: 428 - protein, 9 aa, Artificial Sequence
  Synthetic Polypeptide
IPVKTQVII

SEQ ID NO: 429 - protein, 9 aa, Artificial Sequence
  Synthetic Polypeptide
PVKTQVIII

SEQ ID NO: 430 - DNA, 6395 bp, Artificial Sequence
  Sythetic Oligonucleotide
gtatttttacaacaattaccaacaacaacaaacaacaaacaacattacaattactatttacaattacaatggcatacacacagacagctaccacatcagctttgctggacactgtccgaggaaacaactccttggtcaatgatctagcaaagcgtcgtctttacgacacagcggttgaagagtttaacgctcgtgaccgcaggcccaaggtgaacttttcaaaagtaataagcgaggagcagacgcttattgctacccgggcgtatccagaattccaaattacattttataacacgcaaaatgccgtgcattcgcttgcaggtggattgcgatctttagaactggaatatctgatgatgcaaattccctacggatcattgacttatgacataggcgggaattttgcatcgcatctgttcaagggacgagcatatgtacactgctgcatgcccaacctggacgttcgagacatcatgcggcacgaaggccagaaagacagtattgaactatacctttctaggctagagagaggggggaaaacagtccccaacttccaaaaggaagcatttgacagatacgcagaaattcctgaagacgctgtctgtcacaatactttccagacaatgcgacatcagccgatgcagcaatcaggcagagtgtatgccattgcgctacacagcatatatgacataccagccgatgagttcggggcggcactcttgaggaaaaatgtccatacgtgctatgccgctttccacttctctgagaacctgcttcttgaagattcatacgtcaatttggacgaaatcaacgcgtgtttttcgcgcgatggagacaagttgaccttttcttttgcatcagagagtactcttaattattgtcatagttattctaatattcttaagtatgtgtgcaaaacttacttcccggcctctaatagagaggtttacatgaaggagtttttagtcaccagagttaatacctggttttgtaagttttctagaatagatacttttcttttgtacaaaggtgtggcccataaaagtgtagatagtgagcagttttatactgcaatggaagacgcatggcattacaaaaagactcttgcaatgtgcaacagcgagagaatcctccttgaggattcatcatcagtcaattactggtttcccaaaatgagggatatggtcatcgtaccattattcgacatttctttggagactagtaagaggacgcgcaaggaagtcttagtgtccaaggatttcgtgtttacagtgcttaaccacattcgaacataccaggcgaaagctcttacatacgcaaatgttttgtcctttgtcgaatcgattcgatcgagggtaatcattaacggtgtgacagcgaggtccgaatgggatgtggacaaatctttgttacaatccttgtccatgacgttttacctgcatactaagcttgccgttctaaaggatgacttactgattagcaagtttagtctcggttcgaaaacggtgtgccagcatgtgtgggatgagatttcgctggcgtttgggaacgcatttccctccgtgaaagagaggctcttgaacaggaaacttatcagagtggcaggcgacgcattagagatcagggtgcctgatctatatgtgaccttccacgacagattagtgactgagtacaaggcctctgtggacatgcctgcgcttgacattaggaagaagatggaagaaacggaagtgatgtacaatgcactttcagagttatcggtgttaagggagtctgacaaattcgatgttgatgttttttcccagatgtgccaatctttggaagttgacccaatgacggcagcgaaggttatagtcgcggtcatgagcaatgagagcggtctgactctcacatttgaacgacctactgaggcgaatgttgcgctagctttacaggatcaagagaaggcttcagaaggtgctttggtagttacctcaagagaagttgaagaaccgtccatgaagggttcgatggccagaggagagttacaattagctggtcttgctggagatcatccggagtcgtcctattctaagaacgaggagatagagtctttagagcagtttcatatggcaacggcagattcgttaattcgtaagcagatgagctcgattgtgtacacgggtccgattaaagttcagcaaatgaaaaactttatcgatagcctggtagcatcactatctgctgcggtgtcgaatctcgtcaagatcctcaaagatacagctgctattgaccttgaaacccgtcaaaagtttggagtcttggatgttgcatctaggaagtggttaatcaaaccaacggccaagagtcatgcatggggtgttgttgaaacccacgcgaggaagtatcatgtggcgcttttggaatatgatgagcagggtgtggtgacatgcgatgattggagaagagtagctgtcagctctgagtctgttgtttattccgacatggcgaaactcagaactctgcgcagactgcttcgaaacggagaaccgcatgtcagtagcgcaaaggttgttcttgtggacggagttccgggctgtgggaaaaccaaagaaattctttccagggttaattttgatgaagatctaattttagtacctgggaagcaagccgcggaaatgatcagaagacgtgcgaattcctcagggattattgtggccacgaaggacaacgttaaaaccgttgattctttcatgatgaattttgggaaaagcacacgctgtcagttcaagaggttattcattgatgaagggttgatgttgcatactggttgtgttaattttcttgtggcgatgtcattgtgcgaaattgcatatgtttacggagacacacagcagattccatacatcaatagagtttcaggattcccgtaccccgcccattttgccaaattggaagttgacgaggtggagacacgcagaactactctccgttgtccagccgatgtcacacattatctgaacaggagatatgagggctttgtcatgagcacttcttcggttaaaaagtctgtttcgcaggagatggtcggcggagccgccgtgatcaatccgatctcaaaacccttgcatggcaagatcctgacttttacccaatcggataaagaagctctgctttcaagagggtattcagatgttcacactgtgcatgaagtgcaaggcgagacatactctgatgtttcactagttaggttaacccctacaccagtctccatcattgcaggagacagcccacatgttttggtcgcattgtcaaggcacacctgttcgctcaagtactacactgttgttatggatcctttagttagtatcattagagatctagagaaacttagctcgtacttgttagatatgtataaggtcgatgcaggaacacaatagcaattacagattgactcggtgttcaaaggttccaatctttttgttgcagcgccaaagactggtgatatttctgatatgcagttttactatgataagtgtctcccaggcaacagcaccatgatgaataattttgatgctgttaccatgaggttgactgacatttcattgaatgtcaaagattgcatattggatatgtctaagtctgttgctgcgcctaaggatcaaatcaaaccactaatacctatggtacgaacggcggcagaaatgccacgccagactggactattggaaaatttagtggcgatgattaaaaggaactttaacgcacccgagttgtctggcatcattgatattgaaaatactgcatctttagttgtagataagttttttgatagttatttgcttaaagaaaaaagaaaaccaaataaaaatgtttctttgttcagtagagagtctctcaatagatggttagaaaagcaggaacaggtaacaataggccagctcgcagattttgattttgtagatttgccagcagttgatcagtacagacacatgattaaagcacaacccaagcaaaaattggacacttcaatccaaacggagtacccggctttgcagacgattgtgtaccattcaaaaaagatcaatgcaatatttggcccgttgtttagtgagcttactaggcaattactggacagtgttgattcgagcagatttttgtttttcacaagaaagacaccagcgcagattgaggatttcttcggagatctcgacagtcatgtgccgatggatgtcttggagctggatatatcaaaatacgacaaatctcagaatgaattccactgtgcagtagaatacgagatctggcgaagattgggttttgaagacttcttgggagaagtttggaaacaagggcatagaaagaccaccctcaaggattataccgcaggtataaaaacttgcatctggtatcaaagaaagagcggggacgtcacgacgttcattggaaacactgtgatcattgctgcatgtttggcctcgatgcttccgatggagaaaataatcaaaggagccttttgcggtgacgatagtctgctgtactttccaaagggttgtgagtttccggatgtgcaacactccgcgaatcttatgtggaattttgaagcaaaactgtttaaaaaacagtatggatacttttgcggaagatatgtaatacatcacgacagaggatgcattgtgtattacgatcccctaaagttgatctcgaaacttggtgctaaacacatcaaggattgggaacacttggaggagttcagaaggtctctttgtgatgttgctgtttcgttgaacaattgtgcgtattacacacagttggacgacgctgtatgggaggttcataagaccgcccctccaggttcgtttgtttataaaagtctggtgaagtatttgtctgataaagttctttttagaagtttgtttatagatggctctagttgttaaaggaaaagtgaatatcaatgagtttatcgacctgacaaaaatggagaagatcttaccgtcgatgtttacccctgtaaagagtgttatgtgttccaaagttgataaaataatggttcatgagaatgagtcattgtcagaggtgaaccttcttaaaggagttaagcttattgatagtggatacgtctgtttagccggtttggtcgtcacgggcgagtggaacttgcctgacaattgcagaggaggtgtgagcgtgtgtctggtggacaaaaggatggaaagagccgacgaggccactctcggatcttactacacagcagctgcaaagaaaagatttcagttcaaggtcgttcccaattatgctataaccacccaggacgcgatgaaaaacgtctggcaagttttagttaatattagaaatgtgaagatgtcagcgggtttctgtccgctttctctggagtttgtgtcggtgtgtattgtttatagaaataatataaaattaggtttgagagagaagattacaaacgtgagagacggagggcccatggaacttacagaagaagtcgttgatgagttcatggaagatgtccctatgtcgatcaggcttgcaaagtttcgatctcgaaccggaaaaaagagtgatgtccgcaaagggaaaaatagtagtaatgatcggtcagtgccgaacaagaactatagaaatgttaaggattttggaggaatgagttttaaaaagaataatttaatcgatgatgattcggaggctactgtcgccgaatcggattcgttttaaatatgtcttacagtatcactactccatctcagttcgtgttcttgtcatcagcgtgggccgacccaatagagttaattaatttatgtactaatgccttaggaaatcagtttcaaacacaacaagctcgaactgtcgttcaaagacaattcagtgaggtgtggaaaccttcaccacaagtaactgttaggttccctgacagtgactttaaggtgtacaggtacaatgcggtattagacccgctagtcacagcactgttaggtgcattcgacactagaaatagaataatagaagttgaaaatcaggcgaaccccacgactgccgaaacgttagatgctactcgtagagtagacgacgcaacggtggccataaggagcgcgataaataatttaatagtagaattgatcagaggaaccggatcttataatcggagctctttcgagagctcttctggtttggtttggacctctggtcctgcaacttgaggtagtcaagatgcataataaataacggattgtgtccgtaatcacacgtggtgcgtacgataacgcatagtgtttttccctccacttaaatcgaagggttgtgtcttggatcgcgcgggtcaaatgtatatggttcatatacatccgcaggcacgtaataaagcgaggggttcgaatccccccgttacccccggtaggggccca

SEQ ID NO: 431 - DNA, 8024 bp, Artificial Sequence
  Sythetic Oligonucleotide
ggtatcagagccatgaatcggtttaagaccaaaactcaagagggtaaaacctcaccaaaatacgaaagagttcttaactctaaaaataaaagatctttcaagatcaaacatagttccctcacaccggtgaccgacaggattaccaccgtaaggtttcagaacaacatcgaaagcgtttacgccaacttcgactctcaactcaagtcgtcgtacgatggtagatctaaaaagatcaagactctaagccttaaaaatcttagatgttacgaagccttcctcaggaagtaccttctggaacaataaatctctctgagaatagtactctattgagtatccacaggaaaaataaccttctgtgttgagatggatttgtatccagaagaaaatacccaaagcgagcaatcgcagaattctgaaaataatatgcaaatatttaaatcagaaaattcggatggattctcctccgatctaatgatctcaaacgatcaattaaaaaatatctctaaaacccaattaaccttggagaaagaaaagatatttaaaatgcctaacgttttatctcaagttatgaaaaaagcgtttagcaggaaaaacgagattctctactgcgtctcgacaaaagaattatcagtggacattcacgatgccacaggtaaggtatatcttcccttaatcactaaggaagagataaataaaagactttccagcttaaaacctgaagtcagaaagaccatgtccatggttcatcttggagcggtcaaaatattgcttaaagctcaatttcgaaatgggattgataccccaatcaaaattgctttaatcgatgatagaatcaattctagaagagattgtcttcttggtgcagccaaaggtaatctagcatacggtaagtttatgtttactgtataccctaagtttggaataagccttaacacccaaagacttaaccaaaccctaagccttattcatgattttgaaaataaaaatcttatgaataaaggtgataaagttatgaccataacctatgtcgtaggatatgcattaactaatagtcatcatagcatagattatcaatcaaatgctacaattgaactagaagacgtatttcaagaaattggaaatgtccagcaatctgagttctgtacaatacagaatgatgaatgcaattgggccattgatatagcccaaaacaaagccttattaggagctaaaaccaagactcaaattggtaataaccttcaaataggtaacagtgcttcatcctctaatactgaaaatgaattagctagggtaagccagaacatagatcttttaaagaataaattaaaagaaatctgtggagaataatatgagcattacgggacaaccgcatgtttataaaaaagatactattattagactaaaaccattgtctcttaatagtaataatagaagttatgtttttagttcctcaaaagggaacattcaaaatataattaatcatcttaacaacctcaatgagattgtaggaagaagcttactcggaatatggaagatcaactcatacttcggattaagcaaagacccttcggagtccaaatcaaaaaacccgtcagtttttaatactgcaaaaaccatttttaagagtgggggggttgattactcgagccaactaaaggaaataaaatcccttttagaagctcaaaacactagaataaaaagtctagaaaaagcaattcaatccttagaaaataagattgaaccagagcccttaactaaagaggaagttaaagagctaaaagaatcgattaactcgatcaaagaaggattaaagaatattattggctaaaatggctaatcttaatcagatccaaaaagaagtctctgaaatcctcagtgaccaaaaatccatgaaagcggatataaaagctatcttagaattattaggatcccaaaatcctattaaagaaagcttagaaaccgttgcagcaaaaatcgttaatgacttaaccaagctcatcaatgattgtccttgtaacaaagagatattagaagccttaggtacccaacctaaagagcaactaatagaacaacctaaagaaaaaggtaaaggccttaacttaggaaaatactcttaccccaattacggagtaggaaatgaagaattaggatcctctggaaaccctaaagctttaacctggcccttcaaagctccagcaggatggccgaatcaattttagacagaaccattaataggttttggtataatctgggagaagattgtctctcagaaagtcaattcgatcttatgataagattgatggaagagtcccttgacggggaccaaattattgatctaacctctctacctagtgataatttgcaggttgaacaggttatgacaactaccgaagactcaatctcggaagaagaatcagaattccttctagcaataggagaaacatctgaagaagaaagcgattcaggagaagaacctgaattcgagcaagttcgaatggatcgaacaggaggaacggagattccaaaagaagaagatggtgaaggaccatctagatacaatgagagaaagagaaagaccccggaggaccggtactttccaactcaaccaaagaccattccaggacaaaagcaaacgtctatgggaatgctcaacattgactgccaaaccaatcgaagaactctaatcgacgactgggcagcagaaatcggattgatagtcaagaccaatagagaagactatctcgatccagaaacaattctactcttgatggaacacaaaacatcaggaatagccaaggagttaatccgaaatacaagatggaaccgcactaccggagacatcatagaacaggtgatcgatgcgatgtacaccatgttcttaggactaaactactccgacaacaaagttgctgagaagattgacgagcaagagaaggccaagatcagaatgaccaagctccagctctgcgacatctgctaccttgaggaatttacatgtgattatgaaaagaacatgtataagacagaactggcggatttcccaggatatatcaaccagtacctgtcaaaaatccccatcattggagaaaaagcgttaacacgctttaggcatgaagctaacggaaccagcatctacagtttaggtttcgcggcaaagatagtcaaagaagaactatctaaaatctgcgacttatccaagaagcagaagaagttgaagaaattcaacaagaagtgttgtagcatcggagaagcttcaacagaatatggatgcaagaagacatccacaaagaagtatcacaagaagcgatacaagaaaaaatataaggcttacaaaccttataagaagaaaaagaagttccgatcaggaaaatacttcaagcccaaagaaaagaagggctcaaagcaaaagtattgcccaaaaggcaagaaagattgcagatgttggatctgcaacattgaaggccattacgccaacgaatgtcctaatcgacaaagctcggagaaggctcacatccttcaacaagcagaaaaattgggtctccagcccattgaagaaccctatgaaggagttcaagaagtattcattctagaatacaaagaagaggaagaagaaacctctacagaagaaagtgatggatcatctacttctgaagactcagactcagactgagcaggtgatgaacgtcaccaatcccaattcgatctacatcaagggaagactctacttcaagggatacaagaagatagaacttcactgtttcgtagacacgggagcaagcctatgcatagcatccaagttcgtcataccagaagaacattgggtcaatgcagaaagaccaattatggtcaaaatagcagatggaagctcaatcaccatcagcaaagtctgcaaagacatagacttgatcatagccggcgagatattcagaattcccaccgtctatcagcaagaaagtggcatcgatttcattatcggcaacaacttctgtcagctgtatgaaccattcatacagtttacggatagagttatcttcacaaagaacaagtcttatcctgttcatattgcgaagctaaccagagcagtgcgagtaggcaccgaaggatttcttgaatcaatgaagaaacgttcaaaaactcaacaaccagagccagtgaacatttctacaaacaagatagaaaatccactagaagaaattgctattctttcagaggggaggaggttatcagaagaaaaactctttatcactcaacaaagaatgcaaaaaatcgaagaactacttgagaaagtatgttcagaaaatccattagatcctaacaagactaagcaatggatgaaagcttctatcaagctcagcgacccaagcaaagctatcaaggttaaacccatgaagtatagcccaatggatcgcgaagaatttgacaagcaaatcaaagaattactggacctaaaagtcatcaagcccagtaaaagccctcacatggcaccagccttcttggtcaacaatgaagccgagaagcgaagaggaaagaaacgtatggtagtcaactacaaagctatgaacaaagctactgtaggagatgcctacaatcttcccaacaaagacgagttacttacactcattcgaggaaagaagatcttctcttccttcgactgtaagtcaggattctggcaagttctgctagatcaagaatcaagacctctaacggcattcacatgtccacaaggtcactacgaatggaatgtggtccctttcggcttaaagcaagctccatccatattccaaagacacatggacgaagcatttcgtgtgttcagaaagttctgttgcgtttatgtcgacgacattctcgtattcagtaacaacgaagaagatcatctacttcacgtagcaatgatcttacaaaagtgtaatcaacatggaattatcctttccaagaagaaagcacaactcttcaagaagaagataaacttccttggtctagaaatagatgaaggaacacataagcctcaaggacatatcttggaacacatcaacaagttccccgatacccttgaagacaagaagcaacttcagagattcttaggcatactaacatatgcctcggattacatcccgaagctagctcaaatcagaaagcctctgcaagccaagcttaaagaaaacgttccatggagatggacaaaagaggataccctctacatgcaaaaggtgaagaaaaatctgcaaggatttcctccactacatcatcccttaccagaggagaagctgatcatcgagaccgatgcatcagacgactactggggaggtatgttaaaagctatcaaaattaacgaaggtactaatactgagttaatttgcagatacgcatctggaagctttaaagctgcagaaaagaattaccacagcaatgacaaagagacattggcggtaataaatactataaagaaatttagtatttatctaactcctgttcattttctgattaggacagataatactcatttcaagagtttcgttaatctcaattacaaaggagattcgaaacttggaagaaacatcagatggcaagcatggcttagccactattcatttgatgttgaacacattaaaggaaccgacaaccactttgcggacttcctttcaagagaattcaataaggttaattcctaattgaaatccgaagataagattcccacacacttgtggctgatatcaaaaggctactgcctatttaaacacatctctggagactgagaaaatcagacctccaagcatggagaacatagaaaaactcctcatgcaagagaaaatactaatgctagagctcgatctagtaagagcaaaaataagcttagcaagagctaacggctcttcgcaacaaggagacctctctctccaccgtgaaacaccggaaaaagaagaagcagttcattctgcactggctacttttacgccatctcaagtaaaagctattccagagcaaacggctcctggtaaagaatcaacaaatccgttgatggctaatatcttgccaaaagatatgaattcagttcagactgaaattaggcccgtaaagccatcggacttcttacgtccacatcagggaattccaatcccaccaaaacctgaacctagcagttcagttgctcctctcagagacgaatcgggtattcaacaccctcataccaactactacgtcgtgtataacggacctcatgccggtatatacgatgactggggttgtacaaaggcagcaacaaacggtgttcccggagttgcgcataagaagtttgccactattacagaggcaagagcagcagctgacgcgtatacaacaagtcagcaaacagataggttgaacttcatccccaaaggagaagctcaactcaagcccaagagctttgcgaaggccttaacaagcccaccaaagcaaaaagcccactggctcatgctaggaactaaaaagcccagcagtgatccagccccaaaagagatctcctttgccccagagatcacaatggacgacttcctctatctctacgatctagtcaggaagttcgacggagaaggtgacgataccatgttcaccactgataatgagaagattagccttttcaatttcagaaagaatgctaacccacagatggttagagaggcttacgcagcaggtctcatcaagacgatctacccgagcaataatctccaggagatcaaataccttcccaagaaggttaaagatgcagtcaaaagattcaggactaactgcatcaagaacacagagaaagatatatttctcaagatcagaagtactattccagtatggacgattcaaggcttgcttcacaaaccaaggcaagtaatagagattggagtctctaaaaaggtagttcccactgaatcaaaggccatggagtcaaagattcaaatagaggacctaacagaactcgccgtaaagactggcgaacagttcatacagagtctcttacgactcaatgacaagaagaaaatcttcgtcaacatggtggagcacgacacgcttgtctactccaaaaatatcaaagatacagtctcagaagaccaaagggcaattgagacttttcaacaaagggtaatatccggaaacctcctcggattccattgcccagctatctgtcactttattgtgaagatagtggaaaaggaaggtggctcctacaaatgccatcattgcgataaaggaaaggccatcgttgaagatgcctctgccgacagtggtcccaaagatggacccccacccacgaggagcatcgtggaaaaagaagacgttccaaccacgtcttcaaagcaagtggattgatgtgatatctccactgacgtaagggatgacgcacaatcccactatccttcgcaagacccttcctctatataaggaagttcatttcatttggagaggacacgctgaaatcaccagtctctctctacaaatctatctctctctataataatgtgtgagtagttcccagataagggaattagggttcttatagggtttcgctcatgtgttgagcatataagaaacccttagtatgtatttgtatttgtaaaatacttctatcaataaaatttctaattcctaaaaccaaaatccagtactaaaatccagatctcctaaagtccctatagatctttgtggtgaatataaaccagacacgagacgactaaacctggagcccagacgccgtttgaagctagaagtaccgcttaggcaggaggccgttagggaaaagatgctaaggcagggttggttacgttgactcccccgtaggtttggtttaaatatcatgaagtggacggaaggaaggaggaagacaaggaaggataaggttgcaggccctgtgcaaggtaagacgatggaaatttgatagaggtacgttactatacttatactatacgctaagggaatgcttgtatttaccctatataccctaatgaccccttatcgatttaaagaaataatccgcataagcccccgcttaaaaaatt

SEQ ID NO: 432 - DNA, 6383 bp, Artificial Sequence
  Sythetic Oligonucleotide
gtatttttacaacaattaccaacaacaacaacaaacaacaacaacattacattttacattctacaactacaatggcatacacacaaacagccacatcgtccgctttgcttgagaccgtccgaggtaacaataccttggtcaacgatcttgcaaagcggcgtctatatgacacagcggtagatgaatttaatgctagggaccgcaggcctaaagtcaatttttccaaagtagtaagcgaagaacagacgcttattgcaaccaaagcctacccagaattccaaattacattctacaacacgcagaatgctgtgcattcccttgcaggcggtctccgatcattagaattggaatatctgatgatgcaaattccctacggatcattgacatatgatatcggaggtaattttgcatctcatctgttcaaagggcgagcatacgttcactgctgtatgccgaatctagatgtccgcgacataatgcggcacgagggccaaaaggacagtattgaactatacctttctaggctcgagaggggcaacaaacatgtcccaaacttccaaaaggaagctttcgacagatacgctgaaatgccaaacgaagtagtctgtcacgatactttccaaacgtgtaggcattctcaagaatgttacacgggaagagtgtatgctattgctttgcatagtatatacgatatacctgccgacgagttcggcgcggcactgctgagaaagaatgtacatgtatgttatgccgctttccacttttccgagaatttacttctcgaagattcacacgtcaacctcgatgagatcaatgcatgtttccaaagagatggagacaggttgactttttcctttgcatctgagagtactcttaattatagtcatagttattctaatattcttaagtatgtttgcaaaacttacttcccagcctctaatagagaggtttacatgaaggagtttttagtaactagagttaatacctggttttgtaaattttctagaatagatactttcttattgtacaaaggtgtagcgcataagggtgtagatagtgagcagttttacaaggctatggaagacgcatggcactacaaaaagactcttgcgatgtgcaacagtgaaagaatcttgttagaggattcttcatcagttaattactggtttccaaaaatgagggatatggtgatagttccactatttgacatatctctcgagactagtaaaagaacacgcaaagaggtcttagtttcaaaggactttgtttatacagtgttaaatcacattcgtacgtaccaggccaaagcgcttacttactccaacgtgttatctttcgtcgaatcaattcgttcgagagtgatcattaacggggttactgccaggtctgagtgggatgtcgataaatcattattacagtccttgtcgatgacgttcttcctacataccaagcttgccgttctgaaagacgatcttttgattagcaagtttgcacttggaccaaaaactgtctcacaacatgtgtgggatgagatttccctagctttcggcaatgctttcccatcgatcaaggaaagattgataaaccggaaactgatcaaaattacggagaatgcgttagagatcagggtgcccgatctttatgtcactttccatgataggttagtttctgagtacaaaatgtcagtggacatgccggtgctagacattaggaaaaagatggaagaaactgaggaaatgtacaatgcactgtccgaactgtctgtacttaaaaattcagacaagttcgatgttgatgttttttcccagatgtgccaatctttagaagttgatccaatgactgcagcaaaggtaatagtagcagttatgagcaacgagagtggtcttactctcacgtttgaacagcccaccgaagctaatgttgcgctagcattgcaagattctgaaaaggcttctgatggggcgttggtagttacctcaagagatgttgaggaaccgtccataaagggttcgatggcccgtggtgagttacaattggccggattatctggcgacgttcctgaatcttcatacactaggagcgaggagattgagtctctcgagcagtttcatatggcaacagctagttcgttaattcataagcagatgtgttcgatcgtgtacacgggccctcttaaagttcaacaaatgaaaaactttatagacagcctggtagcctcgctctctgctgcggtgtcgaatctagtgaagatcctaaaagatacagccgcgattgaccttgaaactcgtcaaaagttcggagttctggatgttgcttcgaaaaggtggctagttaaaccatccgcaaagaaccatgcatggggggttgttgagactcatgcgaggaaatatcacgtcgcattactggagcacgatgaatttggcattattacgtgcgataactggcgacgggtggctgtgagttctgagtcggtagtatattctgatatggctaaactcaggactctgagaagattgctcaaagatggagaaccacacgttagttcagcaaaggtggttttggtggatggcgttccagggtgcgggaagacaaaggaaattctttcgagagttaatttcgaagaagatctaattcttgtccctggtcgtcaagctgccgagatgatcagaagaagagctaatgcgtcgggcataatagtggctacaaaggataatgtgcgcaccgtcgattcatttttgatgaattacgggaaaggggcacgctgtcagttcaaaagattgttcatagacgaaggtttgatgctgcatactggttgtgtgaatttcttggttgaaatgtctctgtgcgatattgcatatgtttatggagacacccaacaaattccgtacatcaacagagtaactggtttcccgtaccctgcgcactttgcaaaattggaggtcgacgaagtcgaaacaagaagaactactcttcgctgtccggctgatgtcacacacttcctaaatcaaaggtatgaaggacacgtaatgtgcacgtcttctgaaaagaaatcagtttcccaggaaatggttagtggggctgcgtctatcaatcctgtgtccaagccgcttaaagggaaaattttgactttcacacagtctgacaaggaggcccttctctcaaggggctacgcagatgtccatactgtacatgaggtacaaggtgagacttatgcagacgtatcgttagttcgactaacacctacgcctgtatctatcatcgcaagagacagtccgcatgttctggtctcgttgtcaagacacacaaaatccctaaagtactacaccgttgtgatggatcctttagttagtatcattagagatttagaacgggttagtagttacttattagacatgtacaaagtagatgcaggtactcaatagcaattacaggtcgactctgtgtttaaaaatttcaatctttttgtagcagctccaaagactggagatatatctgatatgcaattttactatgataagtgtcttcctgggaacagcacgttgttgaacaactacgacgctgttaccatgaaattgactgacatttctctgaatgtcaaagattgcatattagatatgtctaagtctgtagctgctccgaaagatgtcaaaccaactttaataccgatggtacgaacggcggcagaaatgcctcgccagactggactgttggaaaatctagttgcgatgattaaaagaaattttaattcaccagagttgtccggagtagttgatattgaaaatactgcatctttagtggtagataagttttttgatagttatttacttaaggaaaaaagaaaaccaaacaaaaatttttcactgtttagtagagagtctctcaataggtggatagcaaagcaagaacaagtcacaattggtcagttggccgattttgattttgtggatcttccagccgttgatcagtacaggcatatgattaaagcgcaaccgaagcagaaactggatctgtcaattcagacagaatatccagcgttgcaaacgattgtgtatcattcaaagaaaatcaacgcaatatttggtcctcttttcagtgagcttacaaggcaattacttgacagtattgactcaagcagattcttgttctttacgagaaagacaccggctcagatcgaagatttcttcggagatctagacagtcatgtcccaatggacgtacttgagttggatgtttcgaagtatgataagtctcaaaacgagtttcattgtgctgttgagtacgaaatctggaggagactgggtctggaggatttcttggcagaagtgtggaaacaagggcatagaaaaaccaccctgaaagattacactgctggtataaaaacgtgtttatggtaccagagaaagagtggtgatgttacaacttttatcggtaataccgtcatcattgcttcgtgtcttgcatcaatgctcccgatggaaaaattgataaaaggagccttctgcggagatgacagtttgttgtactttcctaagggttgtgagtatcccgatatacaacaagctgccaatctaatgtggaattttgaggccaaactgttcaagaagcaatatgggtacttctgcgggaggtacgtgattcatcacgatagaggttgcatagtatactacgaccctttgaagctgatttcgaaacttggtgctaaacacatcaaggattgggatcatttggaggagttcagaagatccctctgtgatgttgctgagtcgttgaacaattgcgcgtattacacacaattggacgacgctgttggggaggttcataaaaccgccccacctggttcgtttgtttataagagtttagttaagtatttgtcagataaagttttgtttagaagtttatttcttgatggctctagttgttaaaggtaaggtaaatattaatgagtttatcgatctgtcaaagtctgagaaacttctcccgtcgatgttcacgcctgtaaagagtgttatggtttcaaaggttgataagattatggtccatgaaaatgaatcattgtctgaagtaaatctcttaaaaggtgtaaaacttatagaaggtgggtatgtttgcttagtcggtcttgttgtgtccggtgagtggaatttaccagataattgccgtggtggtgtgagtgtctgcatggttgacaagagaatggaaagagcggacgaagccacactggggtcatattacactgctgctgctaaaaagcggtttcagtttaaagtggtcccaaattacggtattacaacaaaggatgcagaaaagaacatatggcaggtcttagtaaatattaaaaatgtaaaaatgagtgcgggctactgccctttgtcattagaatttgtgtctgtgtgtattgtttataaaaataatataaaattgggtttgagggagaaagtaacgagtgtgaacgatggaggacccatggaactttcagaagaagttgttgatgagttcatggagaatgttccaatgtcggttagactcgcaaagtttcgaaccaaatcctcaaaaagaggtccgaaaaataataataatttaggtaaggggcgttcaggcggaaggtctaaaccaaaaagttttgatgaagttgaaaaagagtttgataatttgattgaagatgaagccgagacgtcggtcgcggattctgattcgtattaaatatgtcttactcaatcacttctccatcgcaatttgtgtttttgtcatctgtatgggctgaccctatagaattgttaaacgtttgtacaaattcgttaggtaaccagtttcaaacacagcaagcaagaactactgttcaacagcagttcagcgaggtgtggaaacctttccctcagagcaccgtcagatttcctggcgatgtttataaggtgtacaggtacaatgcagttttagatcctctaattactgcgttgctgggggctttcgatactaggaatagaataatcgaagtagaaaaccagcagagtccgacaacagctgaaacgttagatgctacccgcagggtagacgacgctacggttgcaattcggtctgctataaataatttagttaatgaactagtaagaggtactggactgtacaatcagaatacttttgaaagtatgtctgggttggtctggacctctgcacctgcatcttaaatgcataggtgctgaaatataaattttgtgtttctaaaacacacgtggtacgtacgataacgtacagtgtttttccctccacttaaatcgaagggtagtgtcttggagcgcgcggagtaaacatatatggttcatatatgtccgtaggcacgtaaaaaagcgagggattcgaattcccccggaacccccggttggggccca

SEQ ID NO: 433 - DNA, 6357 bp, Artificial Sequence
  Sythetic Oligonucleotide
gtaaatttttcacaatttaacaacaacaacacaaacaacaaacaacattacaaacaaaatacaactacaatggcttacacacaacaagctaccaacgccgcattagcaagtactctccgagggaataaccccttggtgaacgatcttgctaatcggagactgtacgaatcagcggtcgaacaatgcaatgcacatgaccgcaggcccaaggttaattttttaaggtcgataagcgaagagcagacgcttatcgcaactaaggcctaccctgagttccaaatcacgttctacaacacgcagaacgctgtgcacagtctcgcaggtggacttcggtctttggaactagaatacttgatgatgcagatcccctacggttcaacgacatatgatatcgggggaaattttgctgctcacatgtttaaaggtcgtgactacgttcattgctgcatgcctaacatggacttacgtgacgtcatgcgtcacaatgctcaaaaggatagcattgaactgtacctttcaaagcttgcgcaaaagaaaaaggtaataccgccatatcaaaagccatgctttgataaatacacggacgatccgcaatcagtagtgtgctcgaaaccttttcagcactgcgaaggcgtttcgcactgcacggataaagtatacgctgtcgctttgcacagtttatacgacattccagcagatgaatttggggcagcacttctgaggagaaatgttcatgtctgctatgctgccttccacttttctgagaatcttcttttagaagattcgtatgtcagtcttgacgacataggcgctttcttctcgagagagggcgatatgttgaacttttcttttgtagcagagagtactttaaattatactcattcctatagtaatgtgcttaagtatgtgtgtaagacttacttccccgcttctagtagagaagtgtacatgaaggagtttttggtaactagggtaaatacttggttttgtaagttttcaaggttagatacctttgtactatatagaggtgtataccacagaggtgtagacaaggagcaattttacagtgcaatggaagatgcttggcattacaaaaagactttggcgatgatgaatagcgaaagaatcctcttagaggattcatcgtctgttaattattggtttccaaagatgaaagatatggtgatagtacctttgttcgacgtatctttacagaacgaggggaaaaggttagcaagaaaggaggtcatggtcagcaaggacttcgtttatactgtgcttaatcatattcgcacataccagtcgaaagcgcttacttacgccaatgtattatcgttcgttgagtcgataagatcaagagtgataatcaatggggtgactgcgcgctcagagtgggatgtggataaggctttgttgcagtccctgtcaatgacttttttcttgcagaccaaattggccatgctcaaggatgacctcgtggttcagaaattccaagtgcattccaaatcgctcactgaatatgtctgggatgagattactgctgcttttcacaattgttttcctacaatcaaggagaggttgattaacaagaaactcataactgtttcggaaaaggctcttgaaattaaagtacctgatttgtatgtaactttccacgatagattggttaaggagtacaagtcttcggtggaaatgccggtactggacgttaaaaagagcttggaagaagcagaagtgatgtacaatgctttgtcagaaatctcaattcttaaagacagtgacaagtttgatgttgatgttttttcccggatgtgtaatacattaggcgtagatccattggtggcagcaaaggtaatggtagctgtggtttcaaatgagagtggtttgaccttaacgtttgagaggcctaccgaagcaaatgtcgcacttgcattgcaaccgacaattacatcaaaggaggaaggttcgttgaagattgtgtcgtcagacgtaggtgagtcctcaatcaaggaagtggttcgaaaatcagagatttctatgcttggtctaacaggcaacacagtgtccgatgagttccaaagaagtacagaaatcgagtcgttgcagcagttccatatggtatccacagagacgattatccgtaaacagatgcatgcgatggtgtatactggtccgctaaaagttcaacaatgcaagaactatttagacagcctggtagcctcgctctctgctgcggtatcaaacctgaagaagataatcaaagacacagctgctatagatctcgagactaaggaaaaatttggagtctacgacgtgtgccttaagaaatggttggtgaaacctctatcaaaaggacatgcttggggtgtggtgatggactcagactataagtgctttgttgcgcttctcacatacgatggcgagaacattgtgtgcggagagacatggcgtagagtcgcagtgagctccgaatctttggtgtattcagatatggggaagataagagctatacgctctgtgcttaaagacggtgaaccccatataagcagtgcaaaggttacacttgttgatggtgttcctggttgcggaaagacaaaggagattctttcgagggtcaactttgacgaagatctagttctggtaccaggaaaacaggctgctgaaatgataagaagaagggcaaacagttctggtttaatcgtggcgaccaaggagaatgtaaggacggtagactctttcttaatgaattacggtcgaggtccgtgccaatacaaaaggctgtttctggatgaaggtctaatgttacaccctggttgtgttaattttctggttggcatgtctctatgctccgaggcttttgtttatggagacacccagcagattccttacatcaacagagttgcaacttttccctatcctaagcatttgagtcaactcgaggtcgatgctgttgaaactcgcagaacaacgttgcggtgtccagctgatatcaccttcttcttgaatcagaagtacgaagggcaagttatgtgcacatcaagtgttacacgctcggtgtcacacgaggtcatccaaggtgcagcggtaatgaatccagtgtctaaaccacttaaagggaaggtgattacattcactcagtcagacaagtcattgctgctctcgaggggttacgaagatgtgcataccgttcatgaggtgcaaggggaaacgtttgaagacgtctcactagtgaggctgacgccaacacccgtgggaataatttcaaagcagagtccgcacctgttggtctcattgtctaggcatacaaggtcgatcaaatattacacagttgtgctagatgcagtcgtttcagtgcttagagatctggagtgtgtgagtagttacctgttagatatgtacaaagttgatgtgtcgactcaatagcaattacagatagaatcggtgtacaaaggtgttaaccttttcgtcgcagcaccaaaaacaggagatgtttctgacatgcaatattattacgacaagtgtttgccgggaaacagtactatactcaatgagtatgatgctgtaactatgcaaatacgagagaatagtttgaatgtcaaggattgtgtgttggatatgtcgaaatcggtgcctcttccgagagaatctgagacgacattgaaacctgtgatcaggactgctgctgaaaaacctcgaaaacctggattgttggaaaatttggtcgcgatgatcaaaagaaatttcaactctcccgaattagtaggggttgttgacatcgaagacaccgcttctctagtagtagataagttttttgatgcatacttaattaaagaaaagaaaaaaccaaaaaatatacctctgctttcaagggcgagtttggaaagatggatcgaaaagcaagagaagtcaacaattggccagttggctgattttgactttattgatttaccagccgttgatcaatacaggcacatgatcaagcagcagccgaaacagcgtttggatcttagtattcaaactgaatacccggctttgcaaactattgtgtatcatagcaagaaaatcaatgcgctttttggtcctgtattttcagaattaacaagacagctgctagagacaattgacagttcaagattcatgttttatacaaggaaaacgcctacacagatcgaagaatttttctcagatctggactctaatgttcctatggacatattagagctagacatttccaagtatgacaaatcacagaacgaatttcattgtgcagtcgagtatgagatttggaaaaggttaggcttagacgatttcttggctgaagtttggaaacacgggcatcggaagacaacgttgaaagactacacagccggaataaaaacgtgtttgtggtaccagaggaaaagcggtgatgtcaccacattcattggaaacacgatcattattgctgcatgtctgtcctctatgctaccgatggagagattgattaaaggtgccttttgtggtgatgatagtatattatactttccaaagggcactgatttccccgatattcaacagggcgcaaaccttctctggaattttgaagccaagttgtttaggaagagatatggttacttttgcggtaggtacataattcaccatgacagaggctgtattgtatattatgaccctctaaaattgatctcgaaactcggtgcaaaacacatcaagaatagagaacatttagaggaatttaggacctctctttgtgatgttgctgggtcgttgaacaattgtgcgtactatacacatttgaacgacgctgtcggtgaggttattaagaccgcacctcttggttcgtttgtttatagagcattagttaagtacttgtgtgataaaaggttatttcaaacattgtttttggagtaaatggcgttagtagtcaaggacgacgttaagatttctgagttcatcaatttgtctgccgctgagaaattcttacctgctgttatgacttcggtcaagacggtacgaatttcgaaagttgacaaagtgattgcaatggaaaacgattcgttatccgatgtgaatttgcttaaaggtgtaaagcttgttaaggatggttatgtgtgtttagcagggttagttgtgtccggggagtggaacctacccgacaactgcagaggtggagtaagcgtttgtttggttgataagagaatgcaaagagatgacgaagcaacacttggatcttatagaaccagtgcagctaagaaacgatttgccttcaaattgatcccgaattatagcattactaccgccgatgctgagagaaaagtttggcaagttttagttaatattagaggtgttgccatggaaaagggtttctgtcctttatctttggagtttgtctcagtttgtattgtacacaaatccaatataaaattaggcttgagagagaaaattactagtgtgtcagaaggaggacccgttgaacttacagaagcagtcgttgatgagttcatcgaatcagttccaatggctgacagattacgtaaatttcgcaatcaatctaagaaaggaagtaataagtatgtaggtaagagaaatgataataagggtttgaataaggaagggaagctgtttgataaggttagaattgggcagaactcggagtcatcggacgccgagtcttcttcgttttaactatggcttacacagtttccagtgccaatcaattagtgtatttaggttctgtatgggctgatccattagagttacaaaatctgtgtacttcggcgttaggcaatcagtttcaaacacaacaggctagaactacggttcaacagcagttctctgatgtgtggaagactattccgaccgctacagttagatttcctgctactggtttcaaagttttccgatataatgccgtgctagattctctagtgtcggcacttctcggagcctttgatactaggaacaggataatagaagttgaaaatccgcaaaatcctacaactgccgagacgcttgatgcgacgaggcgggtagacgatgcgacggtggccattagggccagtataagtaacctcatgaatgagttagttcgtggcacgggaatgtacaatcaagctctgttcgagagcgcgagtggactcacctgggctacaactccttaaacatgatggcataaataagttgaacgaacattaaacgtccgtggcgagtacgataactcgtagtgtttttccctccacttaaatcgaagggttgtcgttgggatggaacgcaattaaatacatgtgtgacgtgtatttgcgaacgacgtaattatttttcaggggttcgaatcccccccgaaccgcgggtagcggccca

SEQ ID NO: 434 - DNA, 7559 bp, Artificial Sequence
  Sythetic Oligonucleotide
tggtatcagagcttggttatgttcttacaacgatgggagcttaagttcttccattaggtctgaggaaagagttggttgtatggtgtgtttagttcctatctgtattgttattcctgtgttcatgatatagaaaacgatcatcgcgaaaagggtgaaggcactatatctggcagcgagaggagagtaagtccagtgaaacccttcgcatgacgctaaaggtgatctaatctatgtctagaatttgggaagaagcaatacagaaatggtatgagacatcccatacagctaatctcgagtacttagatctagcttcaaaaccaaaagtttccaattcagaaatttcacacaaccttgctgtagtttatgatcgtttgaatctgtttagccgtgtctctattaaaaatttcaaaagtatccaagaaaccttagaaaaacaagaccttagaattcgaaagcttgagtctagtttgaaaaccttaaccagtgagtttatagcccataaacctttgtccaaaagtgaggtaaaagccttagtcacagaaattgccaaacagccaaagcttgttgaagcacaggcccttcagttgaccgagtctcttaaccaaaagcttgatagggttgaaaccctaatagctaaggttgaacggtgggttcattcatgacctaccagaatactgaaaagactcctacatacaaaagagctttagaagcaaccgagcctatcaacagtcccgccctaggttttataaatccagaagattattcaggaggcattactggtacgaaggctttgattaagcaaaacaacctgctcattcaacttgtggtggaactttctgtcaacgtcaacagcttatctgaacaggttgctcaacttacaaggcaacttggaaagcaaccccagcaaggctcatcaacagcaaccttacctgacgatttggttgacaaactcaagaacctttccttaggtactgagaaaaagaaggagaagcgtggtaccttctacgcttacaaagacccatacctgatctacaaggaagaggtagaaaagttaaagaagcaacaacaatgagtaccagtcgtgctcgtacagttatagagcaactccctccggctacaacagctcgggtggaagaaagggataatactcccctctatgatgaccaaatcagagattataggcagtggcagcggcggcggcacaacatggggcggagatggaatcagttgataggacgaccctacaatcagaccttggaacaggttgtggaccctgaagtagctttacagctatcaatgcaggagcgtgccagactagtaccagcagaggtactttacagatcaagaactgatgatcggcaccatcaagtctacattcacaagtcagaggaggctatcctttgtgtagatggtgatcaagttgaccggttactaattcaaccggaaagtgctgaacagttaagcaggagcggtatgtccttcattcatatgggcatagttcaggttcggatccagatcttacacagacagcatgagggaacaacagcccttgtggtgtttagagacaatcggtggcaaggagaccagtcaatatttgccaccatggagctggatttaactaaaggtatgcagatggtgtacataatcccggacaccatgatgacagtcagagacttctgccggaatgttcaaatttccatattaacaaaaggatatgggaattggcagaatggcgaggcaaatctgcttgttacaaggggaattgttggacggttatcaaatacccctaatgtggcctttgcctatcagatccaaaatgttaccgactacttggtcagtcatggaattcaggccctgccaggacggcgatattctactgcagatatacagggccaacaatggttcctaagaccatccaatatcccagcagtcccaatggcccccaccaacgtggatacaagaaacatgattgatggatctatttctcttagattcaacagttaccaaccagctccagatccaacccctgttgcttataatcagcatgatgaggaagtaccccctgatgaagatgaagagcagatccgtaatcataccatcgctttatggcgggaagatgacgaggtatgggatacacttggtgaaccttcgggcaaatttgatttttatgtccgttatactcgacctgcacatgctctacaagatcctgctcatattgttgctactggatgggatgaccttgacaatgatccatccacctcaagtccttctaataatatccttacttacctcaccccttcttcctcttctgatgaggatgatgacatgtcctatctccaataccttgctcaacaatcacctgttccttctcctacacaggatttcaccaatcctttttcggaaggtggtggggaatctacctacccttacccctcatttcaaccaccattcgaccttcaatcagacgactcatatggtactttggcaacttggagtgaatatgatgctatgagtcaatcaaacagtccttcatcacactcagatgctattcaacatcttagtttccagcacccaagtgcagatactgtccttgattttgacagatattcttttacaacaagtgaggatgacgtggttcaatcagcctggatatctgaaaatctatttcgtgaaaacaccggaaacggtgaagttcacaatcttgttccacctagaccggacacccctcggggtgatgaggtcaaaggaactcaggaatccatggcccatactgttgcagtaaccacagaggaatcaaaacatgaggctgaatttgactatccggcttttgccagattacaagcccatgaagagtcagggcggcccaaacccaaaactgagaaagtcttatcctcagcaatttcttcatataccccaccaacggatactgcaatgacacctgttgcgtaccccccagcccaaaatatagccagcccaagttacaatccaagcccacaaatgcccatgttcgaagggtattatcccaaaaggccaaattttaagagggataatcatgcctttatcagtcttccctcggcccaacaaaatactggggctttattcattatgcctcaacaaattggcctgtttcatgaggtttttacttcatgggaagctataacaaaggcctatgttgctcaacagggtatcacagacccaagggataaagccgagttcattgaaaacatgttgggtccaacagaaaagataatttggactcaatggcgtatgggctacgccgatgaatatgagaaccttgttacaactgctgatggtcgtgagggtactcaaaatatactctctcagatgcgaagggtcttttccttagaagatccaaccacaggttcaactgcagtccaagatgaagcctacagagacttggagaggcttacttgtgattctgtcaagcatatagtccaatacttaaatgactttatgcggattgcagcaaagactgggcgcatgttcataggcccagaattgagtgaaaagttatggcttaaaatgccaggtgacctaggccaaagaatgaagaaggcctatgaagaaaaacatccagggaacattgttggtgtttgccctcggattctgtttgcttataagtaccttgaaggcgaatgcaaagatgcagcgttcagacgctccctgaaaaatctatccttttgcagctcaatccctatcccaggctattacggtggtaaaagtggagagaaacgttatggtgtaaggcgcacaaccacttataagggaaagcctcatagcacccatgcaaggattgaaaagacaaaacatttgcgcaataaaaagtgcaagtgttatctgtgtggggaagaaggtcacttcgcccgggaatgtccaaatgaccggcgaaatgtgaaacgagttgcaatgttcgaaggtttagacctcccagatgactgtgagatagtctccatcgatgaaggtgatccagatagtgatgcaatcttcagtatttccgaaggagaagaagctggaactcttgaagaacaatgttttgtgttccaggaagaatgcaatggaacatattggcttggtaaaagaggtggataccaggatctcgtgcaaatctctaaggagatctactattgccagcatgaatgggaggagaatcaacccattaatgatccagcacatgttcggtgttacccttgtaaaagggaaaccactcagagagctcgcttacattgcaagctatgccacataacatcttgccttatgtgtggccccacctatttcaacaaaaagattactgtccagccaatgcctcaagcacccttcaaccaaaagggattgttacagcaacagcaggagtacatcgcctggtgcaataatgaaattgccaggttaaaggaagaagttgctttttacaagcagctcgcccaggagagagaattgcagttgcaacttgagcaatcaaggaaggagctagcaggagtagactctcgcaggcgaaaagacaaaggaatagtaatcgatgaagggtcatgctacttcaatcctgaagaaacaaccaggataattgctcacggtgacacacaagttaccaaaactcgaccagttaagaatatgctctacaacatggatgtgcgaatggaaattccaggcatcccagcttttacagtaaaggcgattcttgacacaggagcaacaacctgctgtattgacagcagaagtgtaccaaaagatgcccttgaagagaattcatttgtggtaaatttctcaggcatcaattccaagcaacaagtcaagcagaagcttaaaactggaaaaatgttcatcaatgagcattacttccggatcccatattgttacagctttgagatgcaaattggtgatggcatccaacttatccttgggtgcaactttatacgaagtatgtatggtggtgtacgattagaaggtaatactataaccttctacaagcagataacaagtatcaacaccaggcttgctgcacctctccttaagcaagaagaagaggagaaagaagaagaactcaacctggaagagcacaggttgattcaagaaatggttgcatactccactgagcggccatttgttcaattccaacaaaagtttgcagggcttattcaagacttaaaagcccagggatacattggggaagagcctatgaagtattgggccaaaaaccaagttgtttgccatctggacattaaaaacccagatatggtaattgaagatcgcccactgaagcatgtgacaccccagatggaagaaagctttcgcaagcatgtggaagccctgttaaaaataggagcaatccggcccagtaaaagtcggcacagaaccacagctataatagtcaactctggaaccagcatagaccctattacagggaaggaggttaagggaaaggagcgaatggtctttaactataaaaggttaaatgacctaactaataaagatcagtacagccttcctggaatccagacgatcctgcagagattaaaggggagcacaatattttccaaattcgacctaaaaagtggctttcatcaggtagcaatgcatccagattcaatagaatggacagctttttgggtgcccagcggtctttatgaatggttagttatgccattcggattaaagaatgctccagcaatttttcaaaggaaaatggatcactgtttcaaaggcacggaggcctttattgccgtctacatcgacgacatcctagtattctcaaagactgaacaggatcatgagaagcatttacagattatgctcgctatctgtcaaaagaatgggcttatcctaagcccaacaaagatgaaaattgcccaagctgaaattgaattccttggggcaatcattcacaaagggcttatcaagttgcagccccacattgttcaaaagttgctcacttttaccaataagcaacttgaggaggttaaagggcttagatcatggctaggcctgctaaactatgcaaggagctatattccccatatgggccgtctacttagcccattatatgccaaagtcagcccaactggtgagcggagaatgaacagacaagattgggccctgattgacaaaataagagcccaagtccaaaatctaccagccctggaattaccacctgcagactgtttcatcatcatcgaaacggatggatgcatggatggttggggaggtgtctgcaaatggaaagtagcgcaatacgaccctcgaagttcagaaagggtttgtgcttatgcaagtgggaagttcaacccaccaaagtcaacaattgatgcggagatacatgcagtgatgaacagcctcaacaacttcaaaatctattacctagacaagtccagtttatgtttgaggactgactgtcaagctattattagcttctttaataagtccaatgttaacaaaccgtctagggttagatggattgctttcacagatttccttactggtctaggaatccctgtaaatatagagcacatagatggaaaaaataaccatctggctgatgctctgtccagattagtaactggttttgtttttgcagaaccacaatgtcaagacaagttccaggacgatttagggaaattggaagcagctcttcaggagaagaaagaggctccgcaagcaatgcacgtagaatatgtctccctgttgatcagatcagcggaccgcattacccgctcgctctgctttatgagggactcgtctcacagcagaatttactcatgcaggccaggcaaagaaccaatgaaggccttaatctgcgaacagaagtcatgccaatccaaaggcgacttagggaatacgaggactgtgcactccaagagtgcattcaatcagcaagacaactggtggccctccaccagcacaaactcgcttacatcagaagcaaagctacaagggacaacgcatatgccgataggctacccacatgcaatcgggaccacgagcaactgtgtgaagtggtcgagctattagaaggaatctcggaaagaatcagcgatacagctgtctaggacagctggcttcaattatggagcgtgatggacccccccgcaataatccaaagtttggtgtgcttttagtagtgcgtctttatggaccactactttattgtaataatcgatgctttttgtagtgcgctcttcgtgcgctctactttatgcttttgcttttgtaagtgcgctgtaagtgcgcctgtctttcttcagatgcttatcctttaagcatcttttgctttttgcgtggcatcctttagttcacaatttaaagaatgacgatggggcccaagatgtgcacccggttctctaaattgcctatataaggatatgccatagccttgtttttgcaagtcaggaatacctgagcataacttggctaagcaaaagtttgtaagtgttctaagctttcatttgtaaactttctgtttggttttaataaaatctctcgtcaatcgttgtgaacatatattgtttgtttgtattgttgtatcttatttgttgtggtgataatggtaa

SEQ ID NO: 435 - DNA, 6509 bp, Artificial Sequence
  Sythetic Oligonucleotide
gtgtcccagtgtcattattccgctcagtttcagatctgccggaattctccaagcatcccgccccaaaagccggctgcttaaaatctgatcttctccatcttgtcaagtgtcgttatgaccacatacgccttccacccgctgctccccaccccgacctccttcgccactatcactgggggtggtttgaaggatgttatcgaaaccctctcgtccaccatccacagagacacgatcgcagcacccctcatggagaccctcgcctcgccttaccgagactcccttcgcgacttcccttgggccgtccccgcctccgccctgcccttcctccaggaatgtggcatcacggtcgccggccacggtttcaaagctcatccccaccctgtccacaaaaccatcgagacccacctcctccacaaggtttggcctcactatgcccaagtcccttcttccgtcctcttcatgaagccctcgaagttcgccaaactccagcggggcaacgccaacttctccgcactccacaactatcgcctcaccgccaaagacaccccgcggtatcctaacacttcaacctctctccccgacaccgagaccgccttcatgcatgacgccctcatgtattacacccccgctcaaattgttgacctgttcctttcctgcccgaagctcgagaaactgtacgcctcccttgtcgtcccccccgagtcctccttcacctctatctctctccatccagatctttaccgctttcgctttgacggggaccgtttgatttatgagttggagggcaaccccgcccacaactacacccaacctcgatccgccctcgactggctccgcacaaccaccatccgcggaccaggcgtttctctcaccgtgtccaggctcgactcgtggggtccctgccattccctcctcatccagcgcggcattccccccatgcacgccgagcacgactccatctcgttcaggggtccacgcgccgtcgccattcccgagccctcctccctccaccaggatctgcgccaccgtctcgttccagaggacgtgtataacgccctcttcctctacgtccgcgctgtccgcacgctccgcgtaaccgatcccgccggctttgtccgcacccagtgctctaagcccgagtacgcttgggtcacttcctccgcttgggacaacttggcccacttcgccctcctcaccgctccacaccggccccgcacctcgttctacctattctcctctaccttccagcgccttgagcactgggtccgccatcacaccttcctcctcgccggcctcaccacagcctttgctctcccgccgtctgcctggctcgcgaacctcgtcgcccgcgcctccgcttcacacatccaaggcctcgcgctagcccgccggtggctcatcactccccctcatctcttccgcccccctccacccccaagcttcgctcttcttctccagcgcaactccaccggcccggtccttctccgtggctcccgcctcgagtttgaggccttcccttctctcgccccacaactcgcccgtcgctttccattcctcgctcgccttctcccccagaaacccatcgacccctgggtcgtcgcgagcctcgctgtcgccgttgctatacccgccgcctccctcgccgttcgctggttcttcggccccgacaccccccaagccatgcacgaccgataccacaccatgttccaccccagagagtggcgcctcaccctgcccaggggccccatctcatgtggccgctccagcttctccccccttccccacccaccttcgcccactcccgctcccgactcccgagctgaacccctccagccaccctccgctccaccctcgacccacgagccggctcccgccgatctcgagccccaagctcctccggcccacgccccccagaccgagcctccgagtcccgtgatcgagcaagaagcgcgtccgaatccccttcccgctcctgccccgctttctgctcccaccccctccgcttccgcgccttcacttgccccaacaccctcggcccccgagcctccctcgccgaccgcttccgagcaggccgcgtccctcatccctgctccctcttccgccctcgtcgtggagccatccggcgtcgtctctgcctcatcttggggcgccaccaaccagccggccgatcaagtcgatgactcccctctcgctcgcgatcccagcgcctccggccccgtccgcttctatcgagacctcttccccgccaactacgcgggtgattccggcaccttcgacttccgcgcccgcgcctcaggccgctctcccaccccataccccgccatggattgcctcctcgtcgccaccgagcaagccacccgcatctctcgagaggccctctgggactgcctcacagccacctgccccgactcattcctcgaccccaagagcatcgcccagcatggcctcagcaccgatcacttcgtcatcctcgctcatcgcttttccctatgtgccaacttccactccgccgagcacgtcattcagctcgggatggccgatgccacctccattttcatgatcaaccacacggctggctccgcgggcctcccgggccacttctccctccgcctgggtgaccagccccgtgccctcaacggtggcctcgctcaggacctcgccgtcgccgccctccgattcaacatctccggtgatctcctcccaacccgatccgttcacacttacaggtcttggccaaagcgcgccaagaaccttgtgtccaacatgaagaacggctttgacggagtcatggccagcatcaacccgatccgacccagcgatgctcgcgagaagatcgtcgccctcgacggtctcctagacattgcccgaccccgatccgtccgcctcatccacattgctggtttcccaggctgcggaaaaacacatccgatcaccaagctcctccacaccgccgccttccgcgacttcaaactcgccgtcccgaccaccgagctccggtctgagtggaaagagctcatgaagctctcaccctctcaggcctggcgcttcggcacctgggagtcctcccttctcaagagcgccaggatcctcgtgatcgatgagatctacaagttgccccgagggtacctcgacctagccatccactccgactcgtccatcgagtttgttatcgccctgggagatcctctgcaaggcgagtatcactccactcatcccagctcctccaactctcgcctcattcccgaagtcagccatctcgctccctacctcgactactactgcctctggagttaccgcgtcccccaagacgtcgccgctttcttccaggttcagagccacaaccctgctctcgggtttgcccgtctctcgaagcagtttcccacgaccgggcgcgtcctcaccaactcacagaactcgatgcttaccatgacgcagtgcggctactctgccgtcaccattgcctcaagccagggttccacctacagcggcgccacgcacatccaccttgaccgcaactcatcgctcctctccccttcgaactccctcgtcgccctcactcgctcgagaaccggcgtgttcttctccggggaccctgctcttctcaacggtggtcccaactccaacctcatgttctctgccttctttcagggcaagtctcgccacattcgcgcctggttccccacccttttccctacggccactctcctcttctcccccctccgccaacgccacaaccgcctcactggcgccctcgctcccgcccaaccttcccacctcctgctccctgaccttccgagcctccctcctctccccgcctccggtccctactcccgctcattcccagttcgatctcgcttcgccgcggccgtcaagccttccgaccggtcagacgtcctctcgtgggcccctatcgccgtcggtgacggggaaaccaacgcccctcgcattgacacctccttcctgcccgaaactcgccgcccgcttcattttgatcttccctcgttccgcccccaagccccaccgcctccctctgacccagccccttctgggaccgcctttgagcccgtttaccccggcgaaaccttcgaaaatttggtcgcccacttccttccggctcacgaccccactgaccgcgaaatccactggcgtcggcagctttccaaccagtttccccatgtcgataaggagtaccacctcgcggctcagccaatgacgctcctcgctcccatccacgactccaagcacgaccccaccctccttgccgcctccatccagaaacgacttcgatttcgaccctccgcctctccctaccgaatctcccctcgtgacgagctgcttggccagctcctctacgagagtctctgccgcgcgtatcatcgttccccaaccaccacccaccctttcgatgaggccctcttcgtcgagtgtatcgacctgaacgaattcgctcaactcaccagcaaaactcaggccgtcatcatgggcaacgcccgccgctctgacccagactggcgctggtccgccgtccggatcttcagcaaaacccagcacaaggtcaacgaaggttcgatctttggagcctggaaagcttgccagaccctcgctctcatgcacgacgccgtcgttctgctccttggccccgtcaagaagtatcaacgcgtcttcgatgctcgagaccgccccgcccacctctacatccacgccggccagacgccctcttccatgagcctgtggtgccagacccacctcacccccgctgtcaagctcgcgaacgactacaccgctttcgaccagtctcagcatggcgaggccgtcgtcctcgagagaaagaagatggaacgcctttccatcccggatcacctcatctccctccacgttcaccttaagacccatgtcgaaacccagtttggccctctcacctgcatgcgcctaaccggcgagcctggcacctacgacgacaacactgactataacctcgccgtcatcaacctcgagtacgcggctgcccacgtcccgaccatggtctcgggcgacgattcactccttgacttcgagcccccacgccgcccagagtgggtcgccatcgaacctcttttagccctccgcttcaagaaggagcgcggtctgtatgccaccttctgcggctactacgcctcgcgagttggctgcgtccgatctcccatcgccctcttcgctaagctcgccatcgccgtcgacgactcatccatctccgacaagctcgccgcatacctcatggagttcgcggtcggtcactctctcggcgactctctttggtccgccctccccctgtccgccgtcccctttcagtcagcctgtttcgatttcttctgccgccgcgctccccgcgatctaaagctcgcccttcacctgggcgaagtccctgaaaccatcatccaacgcctctcccacctctcctggctatcccacgccgtctacagcctcctcccatctcgccttcgcctcgccatccttcacagctcacgccagcaccgttccctccccgaagacccagccgtttcttcgcttcagggtgaattgcttcagacgttccatgctccaatgccctctctcccttcactcccactcttcggcggtctatctcccgacaacatcctcactccccacgagttccgcaccgccctctacgaaagctccgcctaccctactcctcccaactctccgacctccatgtcaggaatccatgcctcgcaagttggtccgccccccgccagcgatgatcgcactgaccgccagccttctcttcctcttgctcctcgtattgtggagagctctctcgccgtgccgcacgtcgacgtcccgttccaatgggccgtcgcgtcgtacgccggagactccgccaagttcctcaccgacgacctctcaggatcctctcacctgagccgcctcaccatcggctatcgccacgccgagctcatctccgccgagctcgagttcgccccccttgccgccgccttcgccaagcccatctccgtcaccgccgtctggaccatagcctccatcgccccagccaccaccaccgagctccagtactacggtggccgactcctcaccctcggaggccccgtcctcatgggctccgtcacccgcatcccagccgacctcacccgcctcaaccccgtcatcaagaccgccgtgggcttcactgactgcccccgcttcacctactccgtctatgccaacggcgggtccgccaacactcctctcatcaccgtcatggtgcgaggagttatccgcctctccggcccttcgggcaacaccgtcaccgccacctaagccctctcaccggtttcaacaggagtttcttcctcgttcttctcctgacgaccaatgaacgttgcttatccccccttcacatccctccgtttccccctccgttttcctctctgttccattccccctctccctccccgtctcagcaatgagtaaggttccaggtcgattcaaagacctgatgggattttcctcgg

SEQ ID NO: 436 - DNA, 9760 bp, Artificial Sequence
  Sythetic Oligonucleotide
acacaaagtcctggacaacaaaaacaaaaaaactctttcatcaatatttcgtttctcttaagtattaactttaaatataattataaagattgtgtattcttcaacgacagaggagttctctatctactttataacagttttattaaagtttgttcttgcgatagtatgggttactatcactccaagactgataatccaaaattgataactacaaaaataaggaagtacaaagtattctcaattcctgttaaaactcaggttatcatcattactggatcgactctctcattagacttctttacactacaaacatggatacacctccaagagggttttatcttagaaatgggtgttagatctacaaatggtgtgctgaaaatagttaacactatttgccaagagaatgggaagatagagcgtgataggtgggattggtacggttgtgcggatagtggtttgcgtaaggttcattatgatgaagggatagctagatctgagagaacaagcataagggttgatattcgaggtaccttatttgtattgactgtagatgggcacatacttggggtgtatgatgttaatagctgtatcaatgccataaatattggtttggaagttttgccaaattcagataacacgctggattttgatttaatatatcactaggaaaatacttatattaaaggtagatattaattaaatatcggatatgggccgaagcccatatatccaatcaaatgtccaatattctctagcataatccaaacacacaaactagaacatgtatgacctacctctacccctccttcctctccctcttgaagaaggcgggttataagtaggaaactgtgaatcaggcacatcatacatgaattgtagaatccttttgtagtgcattgaactcgctggcagtttctgtcgactttcacctttaattatattcatagttaatctcaaatcatctgttcccatgaatgtatccattttcctaactgaagataagaacattttatgaaagagagaaacattaactgcctctttctccatttggatttcgtcttgctcctcagcaagatctctagccaactcatacaggtgttccaagtcttcatcttttattgtcatatcaatagttttatatgcttggctaatcctggttaatagtgactccatactttccaactcttcacaaacttccttgtcttcttgaatactctcaggataatcatgagctaacctatctcttgctgccttgcttagcttagatagttgaactatcttttggtagcctaatgatgattcaaaaagttctctgcaccaactcttcagtcttttctcatcaactagatctggaaactgacccaaattcatctgtgtgaataaactagtgggtgctctctggtctctccacaatatccagtctttaagccaatcatccattttgagtctttttatcatattcacattctgctgtgactgtagctcactagtgatcacatctttctttgaaagatgaacagtcaacactgttgtgtaaggtgctctctcaccagtgcactcttgaagcaatcttatagagtgatcagttatgtcaatacagaatgagtctgacaaaaatggctggtgaattatcaacttgggatctagaactattggacatccatctctatcactcatttgtacccttcgaaattcaaacatcctcccaagcatttcacagtctctgttaccatatgccatagtgtagtgggaatttcccactcgatgttctcttgaccattccttcaatgattgtatagtatctgataggtgcattgcactagatagactaacacttttgatgtaagactccatattttgatcagagtttacttcaatctgaactgctacatcatgtagataacctctccaaacacctggtccgaagtacttcttttcctccctgttatatgattgcttttggacgtagccacctagtagacctagattaccaattcttatcttctccataatgtctctcctacagtatttagcttcatccctcagtttcattaggtcataactactcttaacaatcctgtgaccaatcattgtcaaccagttcctcgttggatcattagctgcttctgcttttagtaattctaagcttagcagcattttttgtgttggttttcttttgttatactgttgatatgcatcctctagaaccctatcacagtatatgtactgacaatatgctcttctagcagaagcactgagactatttatagtgagatcttcaaagtttttctccagctcctcatatcccataccactgtcaagcaactctttctccactaattgccccattcttattaaggacctgaaaccaccaagagaaaggttttgatcaaactcgccaagatgatgttcaaccaaattcactgcatcctgagtgttgtagtctccagagaacttcaggtcaggatctgttctcaagaacatttgtattatagccagcttgttccttttggaacctaacatagatgttgagtattctagatccttattatcaactatgagatctgtcattgcaactagcttctcctcatattttaaaggtgattggtttaacattgttaagttagatagtagagatttataatcctcagttttttctttctttatcacatctgtaaaacctccagagaaaactattccattggagaaattatttctgataagtgtcattaggttgacgtttcctgaggaagccttgcccatagttcctacaaaatgcagaactctccccttcgtgctcactctagataggtagttattaagctgaatgtagctaacaaatggtgatcctactaaggtgtctccgattgtgtctctgagccagagccaggtctctttgtattttttccaaactatctttaatgttttggggtgtgctggtacatccttttctccgaaccatatgaactttgcaacagaatacactgagaatgttgaactctgttctgttccagtcaattgaatctgtgatctcacccttctcctttgattgattccactcctagccatattgagatttaggctggagagattggattctatttctaaataatccgtctcttctgggaacaatgactgtatctctttgtatgattcttgtatttgtcttctatgttcatcagacatactgctagactcttgtcttctaactaataagtaatttggatttagcatgaagtacagattctcagaatttgtcaggcacttaaaggtgtgacataatttaaagcttgcttcagggtctctgcttatatacacgtgtatgttaattccgaatcctttggacaatttatgcattaacttattttcgtcaatgaaccagtcattcagtttagtatcatcaagagtcaatccaaacttttcagacaacagcctctctgattgttccatggttaggtcagttaaaactgaaaccatctttataacaccctctctcagtccttctactgaataaaaatcatcactgggctcttctgttaaagattggacgccaggaatctgagcttctttctggccaatcttacttaccacattggagttgctgtttagtaattctctgaaaatagaggtctttctcttctcatctgtttctacaccagcagacatgctgaacaatacatttctagatataaaatacactgaggatgcaactcttcttccaagagtatttgtctttgctaagctttgcataacacctgggcttctcatcttgatagcaattttctgctgcatttcttctgcattcttagcatggaaaaatagtattctaggattttgctcgatagaatcaaagatatcatctgttaagtgcatcctatcacacatcttcatccatttggtcttgttgccgaatccaacagttgtagtcctagagagtactcctagattagcaatatcaggtgtcatcttcctctttgaattttcagtattgaattccagatttagcatgtctgcatatttcactgataagaatgactgcttgcatgttttccatagattatatccaaaccccatcaacccagatgccattgggtggtccattagaaagtatccaagagctggatcttttgacaacttaatcatcgaacagtagctgccccatagaggtgatactgaagacccatacatcctatagtgtaacattgcttgagcaacttgagttacgaaagtgtgatagaacgtccctccaccttccaatatatccttaagagtgtttgacatctcctcttgactagcgatcaaggtttcttgctcagagacattcagtgcagcattcacccatctaattgttggtctatgggtgtctcctgcaaagaaaaactcaatattaaattccatcataaatattgttccggttgttgattttatagatttgtagatacctaacatatccccatagtattctttcagggagaatgctctatctaccaacagaagcattgcaaatgtttgcctgtcattcatagatttagttgagaatgatatcatcattgagctatcatctgatgactccatgcaatctataataacattagactcattatctggttgtattatcctagccatctgtgggagttgtttcttttgcctctctgccaaatcctctaggaatatagcatgaaacagagagctgatataatgcagtataccttgcataaatcctgattctgtttctatataagtcatacctcttgtcatccagggagcaacctctcttcctttaaaaacctcatgaactttcttgaccttttcatcagtagtatttagtacatcatttgcacaaaagagtctaagtaagtcatcacccaagaataatcttttgtgaaaccataattgtaatgccctaactatgaagccgtgccagaattttggtagaatcctaactaatatggttataaactttgagacatggtgaccttgattccattttgatgcatcatcactggtacacacagtaaagtagctatcaccaaattcctttcttgctgcaatattgtgtttatttggaatttgaaatttgttcttaggatgggtcatagtctcactagggacgactgataatatagctctggcaagatcttcaacacatttttgtacaatcctctcatatatatttaagacataaatctccctaagccctccatgctggttcttcctgaaaatacacacatgcaggcaagcattcttttcaacctcctccagagactctttgagaagatcaacaactaacctatacttttcattaggatcctttttagttaagatagtttgtattttttctataactttcgacctaccatagtttctcctgttagattctgatttaggtagatcttcgttaacggtctgcggtctacttcttttattttcattaggtctgtactcatagtactcagccgaaaaattggatgatgcttttagggtcacaaaagactctaaaaactcatgtgacagatactctagacataaagtgctcaggtaatccttaggatcactaactcctgtctcgcttttcaatcttcccagaaaactatcacacatccttttaaccagagatatagaatacatgtgggtactacactgatcaactggagggtcttctaatcccaaatacttcttatcttcacctctgggcagcttgtcctcataccctaatatcttagatatgagttgccctgatgcattatcttctggatcctcatctttgttcttgagataccctaaatacatgctacttagcattacatcatgatttggaaaattggacagtgagccattttcagttacaaagggattttttatgttataccatctcctcattggtccactgttgtccaatctaatgggagtctctgtgtagcattccatcaatttaatggcagactttatgtagaatacttccaatctagatcttggtattgttgatagtttttcaaacatcttatgaggtttaggccagttaggagtctccacaaatgcctccatatgtatgaatcttgtactagtgatgacttcctcagtctggtgcttatcatttaggagtaccaataaacagttcgcccacatcttgagataatcagagttgaaatcttcatctggtatactggagataccaatatttggtgggatattatattgctctctccagaaagcatataaactcaacattagagattcacatctagtccaattgaccagtttagaatagttcactgatatgaaatcagtgtagaggaacctatctcctagttttgatactttcttgaaagtagtgtttataattttgcttaactcctgatcctctctaaaaagtaaagaaaagaaaactttaccatcactcccagttgatttgatgagaacgtacacttggaaatccctcaatcttttcacaataaactctcttggttgacagttctgcttgacagaaattgatagttcaacagccaaatctgatacaaacttagtgaataggtatgccttgctcttgagatatgtgtctaaggactccaacagtctagattgagaagaacaaccatgaatcttaagtgaatcacttattaggtctaacacactattatctaattcttgatcatgaggtgtaaacaattggagacactcttcatttataaacctctcaatgtcatcagtggatgtgaataaggagaagggtttctttgactcatttctgtaagccagtacctcaggatccttactatatttcttaccatttattcctatctttgctagatctatcctatcatccatgtcaaacaccatcgaaattctgttgaatttattcctaatctttttgagatcatcctccatttgagtggaaagagttggttcttccattgcaagagagaaatccgatttaccatcttcaatctcatatagataatgcatgaaaccacaaatgccttgtttccaagcttcttctgttgaactcattgaagaagtactaatgatttcatcaactacatttctgacctcctcatgtgtgttgcttactcccacaactcgcacaatcttgggaactaacattggaagctgaacagatgcctcgttggatgttctgtaagcttcttcattttttataaagttggattcatattccattttccttgattgcatcatcaatatggattcatttcttatttcatctctataggctcttatatttacatcattaagatgcttcagtttctccatcttcctcatggatttattggagacgtaagtatcaagtttgtgtaagtaatcataatcttcagattctagtgtcccaacagctttagtataatgagccatggtatatggtttaataaatttactgggatccaattctccatcttccttatgtattcttattccttctataatcttctttatagacgagatctccattttcatcgcttggtcagcctttatgtcatattctaaattttgctcaatttgtagggctatctgtcttgctagtttatatctatagatcaattcatccattgtctctgtggggagattcatcaggttagtttgaacgccattttgacacactacgattatatagtaatctatgctaatcttgaagtggtctctcctattgtgaatagcatctctgtacttgagagttttatcttcccaacctctgcttcttacatctggtctcatattagtgtttctagtagtgaactcaataacactgtaatgtttttccccatgttttattatcatgtcaggggtcttattattgtctggatctccaggtataaagagaccagcatcagtgaaagagacatctagatcatcaccaaacagggcaaaagtgaagtcatggacaatgtttttcactgtgcttattttgcatgagtaagctctgttgtcgggtattgaaggaaagtcatgatacttcctattaccaaatctattttcaaagctgatcacaatttcagtttcatcaggagaaacaatctcactagtttctggcactttcaaccttggatgcatctcatacaatccatacatagattcatcataaccactatgttcaggatttgttaacttctgtatatcatcatcgtaactcgtgaacaggaattctgctgttttcctgctgaagctaagagtggggaaatccttatcatattggtcatctctgagaactgtcactggcaaaccactttttacagcaccccataggtttccttcagagtccaataaaaaatgtttctgcttcttagtaagttcaggattctgaccccagtatttataaatttttggttttaatatcgtcccaacattgaccatatcattatccactaggagtatagtgagcagattttccaactcttttgataggaaacaaagtgataacaatttattcttgttcaaaaacggttcatagtccacttctctgcgctgtggaaatattgttttacacttctcaatcattttcagtttgttactataccaattactaggttgtacaaatgactgtgttagttgtcttattagtgactccaagtcatgcactttttctaacacctgataattctgatcaacttcaagtagtcctgaaatctttaggaaaaaccacttgttcgttgagccatcataaataagctctaataagccattccctggccctacacacttgaaaccaccttctaaactatacaagttctcatgatatgacaacaagcgaacttctatagtcattcccaaattgagtgacaacattgctacctcttgctgcctagaatacttcttcagtcttacaatggaagaaaataagttgcagttaaattgaggcacttgctgatgtaaattactttcagcaagactagcaagagaattgtaccactggcctctctcagtgaaaacatctcccaatggttttgtctcaaccttcagctcaatcatgctaggtagatctatgtcatcatctaaactacctagatatccacctaatactgaagatagctcaaagtagtcatatgttgggtcatctatggcttcatagtgcctactttccagtttcatgtgaatcatcaacttactcctatcaccgaatgttttacaatggctgtcccatgtttcatcatgaatacatatacatatgtctagacatattgaaacatgaatgattgaataataagtagccatataagaatcatttggatccagttctcgtaacaactccttcaactcagaagctgtccatatactcatggcatagtactgattcctcagcttgttcatcaccttgatgtaatccttactctccactcttaaacataaacataaggcattgaagaaacattttagatttggagagggagtcggtattgtttcagcacctttatagaagcaatccaccaggctaccgttgatatcatattcgacatcattgtacttaaacctctctacacctactatttcattgttcatattatgtaagtaggaaatattagagaattgacagtttgtattcatgttagctagtgagaggtatacaacaatgacaaaaccaaccagatgatatggtgtggacaatattctagagatattattataatgtaattaagaataagaaattaactaataaataaatgcaataattaataaaattatattactgaaaaagtattccctgaatattatgctatttgttcgtttttctaattttgtccagactttgtgt

SEQ ID NO: 437 - DNA, 4114 bp, Artificial Sequence
  Sythetic Oligonucleotide
ttaaatcgtcccgatttagcaagccatggctctttatccgtctcaagatgtcttggccctcactcagtggggtgccaaatggctcaagttcggtttcaacatggttgtcggtaacacacccgaggcgcagtttgcccaaggaactcctcacggcgtttgatacatgtaatgtggctcccgaagcacttttggtgttgcggtccacatcgttgatgatacttgaggaaacctgtgtggttgtgggtgcggcagagatgcccaccgctgaggataactctggtcgggagttgttcattggctccaacggtgacccgatggaaaggaaaacccgcacggcgcaccatgccatcaagaagaccgtgcgcatcaagaaagggcatcgcacaaccttcgccatgactgtggcgaacggggcgtatgtcaagtttggtgcccgtccattgacggaggcaaatgtgctggtcgtgcgtaaatggatcgttaagcttattgctgacgagtacaaggatttgcgggtgtgcgaccaggcactggttatagaccgtgccacgttcctatcattcattcctaccatggcgtggaataactataagtttatcttccacggtaagaatgccgtcacagatcgcgtggcgggagagaacctgttttcccggatcgcccaatgggcgaatccagggaaataggggtgcccagtagtcgtcacagggcagggatgcgtcattagccgcgctcccgattgtgcccagttgcgtgtgaagaggctattgggagtcacaaagaaccggacatgtatgcgtgtgtctggggtttcccctaacatccaaatcatcccgttcaataacgacatcacgactctggagagggccataaaagagagggtgttctttgtcaaaaacctcgacaagggatcgcccaccaaatttgtctcccctcccagacctgcgcctggtgtgtttgcccagagattgtcaaatacgttgggactgttagtaccttttcttccctcgaccgctccgatgtcacatcagcaatttgttgatagcacgccgagccgcaagaggaaggtgtaccaacaggctctcgaggatatcagttgtcatgggctgaacctcgagacagacagcaaggtgaaggtgtttgtgaaatacgagaaaaccgaccatacatccaaggcagatccagtgccgcgggtgatttctccccgtgatcctaagtacaacctggcgctcggcaggtatcttaggcccatggaagaacgaatattcaaggcgcttggcaaattattcggccatcgcaccgtcatgaaaggtatggataccgatgtgacggctagggtgatccaggagaaatggaacatgttcaacaagcctgtagctataggcttggatgcgtctagatttgaccagcatgtttcactggaagcgcttgaatttgagcattcagtgtacctcaagtgtgtgcgcaggatggtggacaagcgtaagcttggcaacatcctgcgacatcaacttctaaacaaatgttacggcaacacgcctgatggcgcggtgtcgtacaccattgagggtacacgaatgagtggggacatgaacacatccctaggtaattgcgttttgatgtgtatgatgatccacgcttatggtttgcataagagtgtcaacatacaactggcgaacaatggggatgattgtgtcgtgtttctggagcaatccgatttggccaccttctcagaaggcttgtttgaatggttcctagaaatgggattcaacatggccatcgaggagccctcctacgaactggagcatatcgagttttgtcagtgcaggccggtgtttgatggtgttaaatacaccatgtgccggaacccccgcactgccattgctaaagatagcgtgtatctgaaacacgttgatcagttcgtcacatattctagctggctgaatgccgtggggacaggtgggttggcgctggcgggtggtttgcccatctttgatgcgttttacacctgttataagcgtaacagcaactcccactggttcagtggccggaaaggaaggttgaaaaccctgtcaagtgttgatgattcgctcccctggttcatgcgcgagcttggactgaaagggaaaaggtcgtcagccgagccgttaccagcgtctcgtgccagcttttacctcgcatggggggtcaccccctgtgagcagttggagcttgagaaatattacaaatcgttcaaactggacacgtccacattgcttgaggagcatttgtggcagcctcgcggggtgtttcccgatgaggattgagcacattgtggaagaaggtcaccacattaaatccaccctttaccatggggcttgtcgttaaattgccaaaaccaatttgatgggctgatatagatgccaagagactgcacggcatactacgtcgacaagtgaacagtcccgttgtgttgcgggatcccatactaacaatcgttcctatgactctgaacttacgtaaggtaccagcatacctaccaggcaaagttgacggagcgctcactaatttggtgcacgccgccgttgaccacgtggttcctggattaggcaaagcagagaaagctgcggcagtgtacaatatcaaacaggtcgttaagaaactcggtacatacaccgagcaaggcgtcaagaaaatcgcaaagaaaacgttgggtgagttgggttatctcaattacaccccatcgtcacatcttggcatggctataaccggtcgaggtacaaaacaaatcaatatgtctcgcagcacaaatgctggcggttttgccctcggtggcaccaccgcagcgccagtgtccatatcccgcaatatcaaccgccgctccaagcccagcattaagatgatgggtgatgcggtggttatctcgcacagtgaaatgttgggtgccattaattctggcaccccttcatcgaatgtcaccgctttccgttgcactggctaccgagctaatcctgggatgtcaactatcttcccttggctgtctgcaactgccgttaattacgagaagtacaaatttcgtaggctcagcttcactcttgtcccgttggtttctaccaattatagcggaagaataggagttgggtttgattacgattcgtctgacctcgtacctggcaacagacaggaattttatgctctctcaaaccattgtgagaatatgccgtggcaggaaagcactgtggagattaaatgtgataatgcgtaccgattcactggcactcatgttgcagcggacaataagctgattgacctcggccaagtcgtggtgatgtctgattctgtgtccaatggtggcactatttccgctgcgttgccgcttttcgacctgatagtcaattatactgtggagctgattgaacctcaacaagccttgttttcatcccaactgtatagtggttctaccacttttacctctgggataccacttggcacaggtgctgataccacaactgtggtcggtcccactgttgtaaactccacaactgtcacgaactgtgtggtcaccttcaagctgcccgctggggtgtttgaggtgtcatatttcattgcctggtccacaggaaccgctgctgttgtgcccactgttcccactactggggctgggtccaagttgtcgaacacatccactggctccaactcttatggggtctgtttcataaacagccccgttgagtgtgatctgttgcttacggcaacggtactgcttataattccaaccttaccaagttcaacgtgtgtgtttcacgcacctgctcgcaggtgtacaacgcctatgtgtcataggttgctaacgtctcttgctggctgagacattaataaatggatccagtaggtcgtcaaagcaaaccaacaaggcttgccggggtggatgcgtagcgcagcatgtctgtgttggtacggccacacccggagggacctcaccttgtaggcaggagtacacgactgttttctttattgttgctcacaatggaaaatacaaaaataggcttatcaccatgatggacacgccaaaatattccagccctggcgagtcgcggtcgcaatccgcagtttattaaaacccttcggggtgggc

SEQ ID NO: 438 - DNA, 8970 bp, Artificial Sequence
  Sythetic Oligonucleotide
acacatagtcagaggaaaaaataattttgattttgttttccacaaaagaattgaaggatgacgacaccacctctcgttatacccttgcatgttcatggcaggtcttatgaactgttggcggggtatcatgaagttgattggcaggagatagaagagttggaagaaacagatgtcagaggagatggattttgtctttatcattccatactatatagtatgggcctgagcaaggagaactctcgcaccactgaatttatgataaagctacgatcgaatccagccatctgccagctggatcaagaaatgcaactgagccttatgaagcagcttgatccaaatgactcatcagcctggggtgaagatatagcaattgggtttatagctataatattgagaattaagataattgcttaccagacagttgatgggaagttgtttaagactatttatggtgctgagtttgagagtactattagaattaggaactatgggaattaccacttcaagtcacttgagacagattttgatcataaagtaaagctcagatcaaaaattgaagaattcttgagaatgccagtggaagactgtgaatccatatccttgtggcatgcatctgtttacaagcctatagtatctgatagcctttctggacacaagagctttagtaatgtggatgaattgataggtagcataatatccagcatgtataagatcatggacaatggtgatcaatgttttctttggagtgcaatgagaatggtagccagaccctctgaaaaactatatgcccttgcagtgtttttgggattcaatcttaagttctatcatgtgaggaaaagagctgaaaaattgacggcaaaacttgagagtgatcatactaatttgggagtgaagctgattgaggtatatgaagtttctgagccaaccagatctacctgggtcctgaaaccaggagggagcagaataactgaaacaagaaattttgtgattgaggagataatagataacaggcgctctctggagagcttatttgtgtcaagcagtgagtatcctgcagagttatgttcccagaaacttagtgccatcaaagacagaatagcactaatgtttggctttatcaacagaacccctgaaaacagtgggagggaactctacataaacacatactatctgaagaggatcttacaggtggaaagaaatgtaattagagattctttaagatcacagcctgctgtggggatgatccagataatcagattaccaacagcatttggtacatacaacccggaagtgggcactctgttgttagcccaaactggactaatctatagacttggcaccacaactagagtgcagatggaggtcaggagatctccctctgttatttcaagatctcataagatcactagttttccggagacacaaaaacataacaacaatttgtatgattatgcacccagaacacaggagacattttatcacccaaatgctgagatctatgaggctgttgatgtaaagactcctagtgttattacagagattgttgataatcatatagtgataaaattgaacactgatgataagggttggtcagtcagtgattcgataaagcaagattttgtatatcggaagagactaatggatgcaaagaatattgttcatgactttgtttttgatatcttatcaactgagactgacaagagctttaagggtgctgacttatctataggaggaatctcagataactggtcaccagatgtcattatatcaagagaaagtgatccacagtatgaagatatcgttgtctatgagttcacaacaaggtccactgagtctatagaatctctactaagatcagtagaggttaaaagcttacgatataaagaagcaattcaggaaagagccatcacattaaagaagagaatatcgtattacacaatatgtgtcagtctagatgctgtagccacaaatctgctatcacttcctgctgatgtctgcagagaactaataattcgtttaagagttgctaatcaggtgaagatccagctagctgataacgatatcaatcttgactctgccactttgctagcacctgacatttacagaataaaggaaatgtttagggaaagtttcccaaataataaatttatacatcctattactaaggaaatgtatgagcattttgtcaatccaatgatttcaggagaaaaagactatgttgccaatttaaagagcataatagacaaagagaccagagatgagcagagaaagaatttagagagtctgaaagttgtggatgggaaaaagtacacagagagaaaagcagaaactgctctgaatgagatgtcacaagcagaagagcattatagaagctattttgaaaatgacaattttaggtccacactaaaagctccagtccaacttcccttaatcataccggatgtgtcaagtcaggacaatcaattctcaaacaaggaactatctgataggatacggaagaagccgatcgaccaccctatttacaacatctgggatcaagcagttaataagagaaattgctcgattgcactcggccatttggacgagctagaaatatctatgctagaaggacaagtggctaagaaagtggaggaatcttataagaaagataggagtcagtacaacaggacaactctgctaactaatatgaaggaggacatctacttggctgaaagggggataaatgctaagaagaggttggaagaaccagatgtgaaattttatcgagatcagtctaagaggccttttcatccttttgtgagtgaaaccagagacatagagcagttcactcagaaagagtgcctggaactcaatgaagagtcaggacactgctcgctgataaatgtagaggatctagtgttatctgctctagagttgcatgaggtaggtgatttagaacacttatggaacaacataaaagctcattctaaaacaaagtttgcattatatgctaagtttatctctgatcttgccaccgagctagccatttcattatcccagaattgcaaagaagacacctatgtggttaagaaactcagagattttagctgctacgtactcattaaaccagtaaacttaaagagtaatgtgttcttctctttatacataccttctaatatttataagtcacacaacacaactttcaagactctgataggcagtccagaatcagggtatatgactgatttcgtctctgctaatgtgagcaagttagtgaattgggttagatgtgaagctatgatgctagcacaaagaggtttctggcgagaattttatgctgtggcccctagcattgaggaacaagatggaatggcggagccagactcagtatgtcagatgatgagttggacactcctcatattactaaacgacaagcatcagttagaagagatgatcacagtgtctaggtttgtccatatggaaggctttgtaacttttcctgcatggcctaaaccttataaaatgtttgataaattatcagtaactccgaggtctaggttagaatgtctagtcataaagaggctcattatgctaatgaagcattattcagaaaatcccattaaatttatgatagaagacgagaagaaaaagtggtttggattcaaaaatatgttcttgcttgattgtaatggtaaacttgctgatttatctgatcaggatcaaatgcttaatctcttttatcttgggtatctaaagaacaaagatgaggaggtcgaagacaatggcatgggtcaactattgactaaaatcctgggctttgagagtgccatgccaaagacaagagacttcttgggtatgaaagatcctgagtatggtacaatcaagaagcatgagttctccataagctatgtgaaggacctctgtgataaattcttagacagattaaaaaagacacacggaatcaaagatccaattacttatttgggcgacaagatagctaaattccttagcactcagtttattgagacgatggcatctttgaaggcatcatctaacttctcagaggattactatttatacacacccagtagaagactaaaaaaccaggagcaatctagaagtaaacatgtaatagacgccggtgggaatatatctgctagtgtcaaaggtaagctgtatcatagaagcaaagtaattgagaagctcacaaccctaattaaagacgaaacaccaggaaaagaactgaaaatagtggtagatctcttaccgaaggctatggaagtcctaaacaaaaatgaatgtatgcacatttgtattttcaagaagaatcagcatggaggccttagagaaatatatgttcttaatatctttgaaagaataatgcagaagacagtggaagatttctctagagccattctagaatgctgtcctagtgagacaatgacatccccgaaaaacaagtttagaatacctgaattgcacaacatggaagcaaggaaaactctaaaaaatgagtatatgacaatatctactagtgatgatgcatcgaaatggaatcaaggtcactatgtatctaaattcatgtgtatgctattgaggctcactccaacatattatcatggcttcttagttcaggctcttcaactatggcatcataagaagatattcctaggagaccagctgttgcaattatttaatcaaaatgctatgctaaataccatggacacaaccctcatgaaagtctttcaagcctacaaaggggagattcaagtgccttggatgaaggcaggtagatcctacatagagactgagacaggtatgatgcagggaattctccactatactagctctctattccatgctatcttcttggaccaactggctgaagagtgtagaagagatataaatagagcaattaagacaataaataataaagaaaatgagaaggtgtcatgtatagtgaacaatatggaaagttctgacgatagtagcttcattattagtattcccaatttcaaagagaatgaagcagcacaattgtacctgctctgtgtggttaactcttggttcagaaagaaagagaagcttggaacttatcttgggatatataaatctccaaagagtacaactcagacattgtttgtgatggaattcaactcagaattcttcttttctggtgatgttcacaggccaacttttaggtgggtcaatgcagcagtgctaataggagagcaagagacattgtctggtatacaggaagagttgtcaaatacattgaaggatgtaatagaaggtggaggaacatatgccctcacttttatagtgcaagttgctcaagctatgatacactatagaatgctgggcagtagtgcttcatcagtgtggccagcatatgaaactcttctgaaaaactcatatgatcctgcacttggcttcttcctaatggataatcctaaatgtgctggcttgttgggattcaactataatgtttggattgcctgtacgacgacacctttgggagagaagtatcatgagatgatacaagaagaaatgaaggctgagtctcagagcttaaaatcagtaacagaagatacaattaacacgggattagtttcacgaacaactatggtgggctttggaaacaagaaaagatggatgaaactcatgaccacactgaatctgagtgcagatgtgtatgaaaagatagaagaggagccaagagtgtactttttccacgcagcaacagctgaacaaataattcagaaaattgctattaaaatgaagagtcccggtgtgatacagtcactgtctaaaggaaacatgctggcaaggaagatagcgtcaagtgtattcttcatatctagacatatagtcttcacaatgtccgcttattatgatgcagaccctgagacaaggaaaacatcactgctgaaggagttgattaatagctctaaaatacctcagagacatgactatctgcaggaaccgcatacattgaagccaactaaagttgaagttgatgaggacagctgggaattcaagtcagcaaaagaggaatgcgttagagtgctaaaacaaagaatcaaaatacacactgggagagaagagagatctattagtcttttgtttgaaaatatggctaagtcaatgattgggaggtgcacggaccagtatgatgttagagaaaatgtttccattctagcatgtgcactgaaaatgaactattctatattcaagaaggatgctgcacccaataggtatctccttgatgagaagaaccttgtatacccactgattggaaaggaagtatctgtttatgttaagtctgacaaagtacatattgaaatatctgagaagaaagaaaggctatcaaccaaattatttaatatagataaaatgaaggatatagaagagactctctcactactgtttcctagttatggagattacttatccttgaaagaaacaattgaccaagtaactttccaatctgccatacacaaagtcaacgagagaagaagagttagggcagatgtgcacttaacagggacagaaggattttctaagttgccaatgtatacagcagctgtctgggcctggtttgatgtgaagactatccctgcacatgacagcatttatagaactatctggaaagtctacaaagaacaatactcctggttgtcagatacactgaaagagacagtggagaagggaccatttaaaacagtacaaggtgtggttaacttcatttctagagctggtgtgagatcgagagtcgtccatctagtagggtcatttggtaagaatgtcaggggtagcataaatctggtgacggcaataaaagataactttagcaacggactagttttcaaagggaatatattcgatatcaaggcaaagaaaactagagaaagtttggataactacttgtcaatctgcaccactctgtctcaggcacctatcactaagcatgataagaaccagattttgcgctctcttttcgtcagtggtccaagaatccagtatgtgtcatcacagtttggatcaagaagaaacaggatgtcaatattacaagaagtcgtggcagatgatccaactctacattggcctgaccaagacacaagtcagaaacagctagaagacaaattcagagaactagcacacaaggagctcccatttctaacagagaaggtgtttcacgattatctggaaaagatagagcagctaatgaaggagaacactcatctaggtggtagggatgttgatgctagcaaaaccccatatgtgcttgccagagcaaatgatattgaaatacattgttatgagttgtggagagagtatgatgaggatgaagatgaagcataccaggcttattgcagtgaagtggaggctgctatggatcaagagaaacttaatgctctaatagagagataccatgtagaccctaaagcaaactggattcaaatgttaatgaatggtgagattgaaacagttgaagagctgaacaagcttgacaaggggtttgagagccacagacttgctctagtcgaaagaattagggtggggaaacttggaattttaggcagttacaccaagtgtcaacagagaattgaggagctagatggtgaaggtaataagactcatagatacacaggagaagggatatggagaggttcattcgatgattccgatgtttgcatagttgtccaagacctgaagaagacaagagagagttacttaaaatgtgtcgttttttccaaagtgtcagattataaagtcttgatgggccatctgaagacatggtgcagggaacaccatattagtaatgatgagtttcctacctgtactcagaaagagcttttaagctatggtgtcaccaagagttcagttctattgtacaagatgaatggaatgaaaatgttgaggaacatggaaaaaggtattcctctgtactggaatcctagcttgtcaactagaagccaaacttatatcaactggcttgctgttgatatcacagatcatagcttacggcttaggaacagaactgttgagaatgggagagttgtaaatcaaacaatcatggttgttcctctgtacaaaactgatgtgcagatattcaaaacatctcctgtagatcttgagcaagatgtgcagaatgatagacttaagctattatcagtaacgaaagctggggagttgagatggcttcaagattggataatgtggagatcatctgctgtagacgatttgaacatactaaaccaggttagaagaaataaggctgcaagggatcattttaatgctaaaccagagttcaaaaaatggataaaagagctgtgggactatgcacttgacaccacactaatcaataagaaagtcttcataactacacaaggatcagagtcacagagcacagtttcttcaggagatagcgacagtgcagtggcacctttaactgatgaggcagtggatgagattcatgatctcttagacaaagagttagaaaagggcaccttaaaacagatcatccatgatgcaaccatcgatgcccagcttgatatccctgctatagagagcttcctggctgaagaaatggaggtgttcaagagtagcttagccaagagccaccctcttctactaaattatgttaggtacatgattcaagagataggtgtgaccaacttcagatcattgattgatagctttaatcagaaagatcccttgaaaagtgtgtctctaagcatcctagacttgaaagaagtgttcaagtttgtgtaccaggacataaatgatgcctattttgttaaacaggaagaagaccataagttcgatttctgagaagtcctcttcaacaaagggactgcagcacaaacacaagtccagacaccattgaaatccatacaaatatttcacgttttatcccttatgacttagattttcaataattaattatataaacaaaaacattttgttttcctctggactttgtgt

SEQ ID NO: 439 - protein, 9 aa, Artificial Sequence
  Synthetic Polypeptide
FRIMAVLAS

SEQ ID NO: 440 - protein, 3754 aa, Artificial Sequence
  Synthetic Polypeptide
MALLQKLGSSKVSSKRMSPAMIPLDSINQDLVDPQQEKDAKNKKEGKKKDLDVSMDPLTGKLPLGKKKQVDTGGIAYLENALMQLDLHDFSFDSIRPRTKTFHMKRQHFKISTVNSRFRLDVEKTGLFSKTLKYSRICTLCLAFLGIKNRAQGTISFTFRDLSYLSENDQIDFKVKNRISKSFSAIASFPAPIFNDDLGNLICDFEIENASVNGVVIGDLLVLLGIEQSDLPVCYEPQKAKIFEYKPLTEKGLNKISNFAGYVDNVLKAAINHREGEDDGFSTEGLGVLVHPRVKQIDNSIPIKSLENKPQKMLMRDGSYLDVNPMGKVQFGDGHWANNKEWSELLSEIFSKIRASIDGFANATADLAAGLEYQAFNPEKILRKLIASSTSLDDFVKDMRDLLVARYTRGTSFLFNAKNSIEKAKDKKKAEAIQVLINRYGVKKNAGDNAVDQATLGRISQVLAYMALRVALQITDYHKPIIPLRPISTVDIKNAIIDVVPQFLYLKADQLDSKTNSEAALYVIHLCYQVCVSERIMTKAQKDKHSVHTKSAMITHCMGFVNLAMDNSSVVSDDKIAGRRMISGPWGLQETALDATGCACIIDVVDFCCRGHKVTDAVAPVRLFRLAIECIKDTADLKDAGVKLKTLVDKMNTNCQFSNISYLHNMNNEIVGVERFKYNDVEYDINGSLVDCFYKGAETIPTPSPNLKCFFNALCLCLRVESKDYIKVMNKLRNQYYAMSIWTASELKELLRELDPNDSYMATYYSIIHVSICLDICICIHDETWDSHCKTFGDRSKLMIHMKLESRHYEAIDDPTYDYFELSSVLGGYLGSLDDDIDLPSMIELKVETKPLGDVFTERGQWYNSLASLAESNLHQQVPQFNCNLFSSIVRLKKYSRQQEVAMLSLNLGMTIEVRLLSYHENLYSLEGGFKCVGPGNGLLELIYDGSTNKWFFLKISGLLEVDQNYQVLEKVHDLESLIRQLTQSFVQPSNWYSNKLKMIEKCKTIFPQRREVDYEPFLNKNKLLSLCFLSKELENLLTILLVDNDMVNVGTILKPKIYKYWGQNPELTKKQKHFLLDSEGNLWGAVKSGLPVTVLRDDQYDKDFPTLSFSRKTAEFLFTSYDDDIQKLTNPEHSGYDESMYGLYEMHPRLKVPETSEIVSPDETEIVISFENRFGNRKYHDFPSIPDNRAYSCKISTVKNIVHDFTFALFGDDLDVSFTDAGLFIPGDPDNNKTPDMIIKHGEKHYSVIEFTTRNTNMRPDVRSRGWEDKTLKYRDAIHNRRDHFKISIDYYIIVVCQNGVQTNLMNLPTETMDELIYRYKLARQIALQIEQNLEYDIKADQAMKMEISSIKKIIEGIRIHKEDGELDPSKFIKPYTMAHYTKAVGTLESEDYDYLHKLDTYVSNKSMRKMEKLKHLNDVNIRAYRDEIRNESILMMQSRKMEYESNFIKNEEAYRTSNEASVQLPMLVPKIVRVVGVSNTHEEVRNVVDEIISTSSMSSTEEAWKQGICGFMHYLYEIEDGKSDFSLAMEEPTLSTQMEDDLKKIRNKFNRISMVFDMDDRIDLAKIGINGKKYSKDPEVLAYRNESKKPFSLFTSTDDIERFINEECLQLFTPHDQELDNSVLDLISDSLKIHGCSSQSRLLESLDTYLKSKAYLFTKFVSDLAVELSISVKQNCQPREFIVKRLRDFQVYVLIKSTGSDGKVFFSLLFREDQELSKIINTTFKKVSKLGDRFLYTDFISVNYSKLVNWTRCESLMLSLYAFWREQYNIPPNIGISSIPDEDFNSDYLKMWANCLLVLLNDKHQTEEVITSTRFIHMEAFVETPNWPKPHKMFEKLSTIPRSRLEVFYIKSAIKLMECYTETPIRLDNSGPMRRWYNIKNPFVTENGSLSNFPNHDVMLSSMYLGYLKNKDEDPEDNASGQLISKILGYEDKLPRGEDKKYLGLEDPPVDQCSTHMYSISLVKRMCDSFLGRLKSETGVSDPKDYLSTLCLEYLSHEFLESFVTLKASSNFSAEYYEYRPNENKRSRPQTVNEDLPKSESNRRNYGRSKVIEKIQTILTKKDPNEKYRLVVDLLKESLEEVEKNACLHVCIFRKNQHGGLREIYVLNIYERIVQKCVEDLARAILSVVPSETMTHPKNKFQIPNKHNIAARKEFGDSYFTVCTSDDASKWNQGHHVSKFITILVRILPKFWHGFIVRALQLWFHKRLFLGDDLLRLFCANDVLNTTDEKVKKVHEVFKGREVAPWMTRGMTYIETESGFMQGILHYISSLFHAIFLEDLAERQKKQLPQMARIIQPDNESNVIIDCMESSDDSSMMISFSTKSMNDRQTFAMLLLVDRAFSLKEYYGDMLGIYKSIKSTTGTIFMMEFNIEFFFAGDTHRPTIRWVNAALNVSEQETLIASQEEMSNTLKDILEGGGTFYHTFVTQVAQAMLHYRMYGSSVSPLWGSYCSMIKLSKDPALGYFLMDHPMASGLMGFGYNLWKTCKQSFLSVKYADMLNLEFNTENSKRKMTPDIANLGVLSRTTTVGFGNKTKWMKMCDRMHLTDDIFDSIEQNPRILFFHAKNAEEMQQKIAIKMRSPGVMQSLAKTNTLGRRVASSVYFISRNVLFSMSAGVETDEKRKTSIFRELLNSNSNVVSKIGQKEAQIPGVQSLTEEPSDDFYSVEGLREGVIKMVSVLTDLTMEQSERLLSEKFGLTLDDTKLNDWFIDENKLMHKLSKGFGINIHVYISRDPEASFKLCHTFKCLTNSENLYFMLNPNYLLVRRQESSSMSDEHRRQIQESYKEIQSLFPEETDYLEIESNLSSLNLNMARSGINQRRRVRSQIQLTGTEQSSTFSVYSVAKFIWFGEKDVPAHPKTLKIVWKKYKETWLWLRDTIGDTLVGSPFVSYIQLNNYLSRVSTKGRVLHFVGTMGKASSGNVNLMTLIRNNFSNGIVFSGGFTDVIKKEKTEDYKSLLSNLTMLNQSPLKYEEKLVAMTDLIVDNKDLEYSTSMLGSKRNKLAIIQMFLRTDPDLKFSGDYNTQDAVNLVEHHLGEFDQNLSLGGFRSLIRMGQLVEKELLDSGMGYEELEKNFEDLTINSLSASARRAYCQYIYCDRVLEDAYQQYNKRKPTQKMLLSLELLKAEAANDPTRNWLTMIGHRIVKSSYDLMKLRDEAKYCRRDIMEKIRIGNLGLLGGYVQKQSYNREEKKYFGPGVWRGYLHDVAVQIEVNSDQNMESYIKSVSLSSAMHLSDTIQSLKEWSREHRVGNSHYTMAYGNRDCEMLGRMFEFRRVQMSDRDGCPIVLDPKLIIHQPFLSDSFCIDITDHSIRLLQECTGERAPYTTVLTVHLSKKDVITSELQSQQNVNMIKRLKMDDWLKDWILWRDQRAPTSLFTQMNLGQFPDLVDEKRLKSWCRELFESSLGYQKIVQLSKLSKAARDRLAHDYPESIQEDKEVCEELESMESLLTRISQAYKTIDMTIKDEDLEHLYELARDLAEEQDEIQMEKEAVNVSLFHKMFLSSVRKMDTFMGTDDLRLTMNIIKGESRQKLPASSMHYKRILQFMYDVPDSQFPTYNPPSSRGRGRRGRGRSYMFMSKSHSDVVGTVSGLNYRLFYDMIPDRISQKLRLREITDPKTCNASKIPLVLKAAEEVSRMDIDHDKDGYTKVQVKMPEYMKAYLEEMLSASNSTTTGISYSVFLVYMQDKCGDWITEHYLKNVHSMSKQQLHELITGIIETFSSDDIEDEHYDDLICKIPAYVYNIVLRYIDMSGLTT

SEQ ID NO: 441 - protein, 2026 aa, Artificial Sequence
  Synthetic Polypeptide
  misc_feature (1532)..(1532): Xaa can be any naturally occurring amino acid
MAYTVSSANQLVYLGSVWADPLELQNLCTSALGNQFQTQQARTTVQQQFSDVWKTIPTATVRFPATGFKVFRYNAVLDSLVSALLGAFDTRNRIIEVENPQNPTTAETLDATRRVDDATVAIRASISNLMNELVRGTGMYNQALFESASGLTWATTPMALVVKDDVKISEFINLSAAEKFLPAVMTSVKTVRISKVDKVIAMENDSLSDVNLLKGVKLVKDGYVCLAGLVVSGEWNLPDNCRGGVSVCLVDKRMQRDDEATLGSYRTSAAKKRFAFKLIPNYSITTADAERKVWQVLVNIRGVAMEKGFCPLSLEFVSVCIVHKSNIKLGLREKITSVSEGGPVELTEAVVDEFIESVPMADRLRKFRNQSKKGSNKYVGKRNDNKGLNKEGKLFDKVRIGQNSESSDAESSSFMAYTQQATNAALASTLRGNNPLVNDLANRRLYESAVEQCNAHDRRPKVNFLRSISEEQTLIATKAYPEFQITFYNTQNAVHSLAGGLRSLELEYLMMQIPYGSTTYDIGGNFAAHMFKGRDYVHCCMPNMDLRDVMRHNAQKDSIELYLSKLAQKKKVIPPYQKPCFDKYTDDPQSVVCSKPFQHCEGVSHCTDKVYAVALHSLYDIPADEFGAALLRRNVHVCYAAFHFSENLLLEDSYVSLDDIGAFFSREGDMLNFSFVAESTLNYTHSYSNVLKYVCKTYFPASSREVYMKEFLVTRVNTWFCKFSRLDTFVLYRGVYHRGVDKEQFYSAMEDAWHYKKTLAMMNSERILLEDSSSVNYWFPKMKDMVIVPLFDVSLQNEGKRLARKEVMVSKDFVYTVLNHIRTYQSKALTYANVLSFVESIRSRVIINGVTARSEWDVDKALLQSLSMTFFLQTKLAMLKDDLVVQKFQVHSKSLTEYVWDEITAAFHNCFPTIKERLINKKLITVSEKALEIKVPDLYVTFHDRLVKEYKSSVEMPVLDVKKSLEEAEVMYNALSEISILKDSDKFDVDVFSRMCNTLGVDPLVAAKVMVAVVSNESGLTLTFERPTEANVALALQPTITSKEEGSLKIVSSDVGESSIKEVVRKSEISMLGLTGNTVSDEFQRSTEIESLQQFHMVSTETIIRKQMHAMVYTGPLKVQQCKNYLDSLVASLSAAVSNLKKIIKDTAAIDLETKEKFGVYDVCLKKWLVKPLSKGHAWGVVMDSDYKCFVALLTYDGENIVCGETWRRVAVSSESLVYSDMGKIRAIRSVLKDGEPHISSAKVTLVDGVPGCGKTKEILSRVNFDEDLVLVPGKQAAEMIRRRANSSGLIVATKENVRTVDSFLMNYGRGPCQYKRLFLDEGLMLHPGCVNFLVGMSLCSEAFVYGDTQQIPYINRVATFPYPKHLSQLEVDAVETRRTTLRCPADITFFLNQKYEGQVMCTSSVTRSVSHEVIQGAAVMNPVSKPLKGKVITFTQSDKSLLLSRGYEDVHTVHEVQGETFEDVSLVRLTPTPVGIISKQSPHLLVSLSRHTRSIKYYTVVLDAVVSVLRDLECVSSYLLDMYKVDVSTQXQLQIESVYKGVNLFVAAPKTGDVSDMQYYYDKCLPGNSTILNEYDAVTMQIRENSLNVKDCVLDMSKSVPLPRESETTLKPVIRTAAEKPRKPGLLENLVAMIKRNFNSPELVGVVDIEDTASLVVDKFFDAYLIKEKKKPKNIPLLSRASLERWIEKQEKSTIGQLADFDFIDLPAVDQYRHMIKQQPKQRLDLSIQTEYPALQTIVYHSKKINALFGPVFSELTRQLLETIDSSRFMFYTRKTPTQIEEFFSDLDSNVPMDILELDISKYDKSQNEFHCAVEYEIWKRLGLDDFLAEVWKHGHRKTTLKDYTAGIKTCLWYQRKSGDVTTFIGNTIIIAACLSSMLPMERLIKGAFCGDDSILYFPKGTDFPDIQQGANLLWNFEAKLFRKRYGYFCGRYIIHHDRGCIVYYDPLKLISKLGAKHIKNREHLEEFRTSLCDVAGSLNNCAYYTHLNDAVGEVIKTAPLGSFVYRALVKYLCDKRLFQTLFLE

SEQ ID NO: 442 - protein, 1814 aa, Artificial Sequence
  Synthetic Polypeptide
MENIEKLLMQEKILMLELDLVRAKISLARANGSSQQGDLSLHRETPEKEEAVHSALATFTPSQVKAIPEQTAPGKESTNPLMANILPKDMNSVQTEIRPVKPSDFLRPHQGIPIPPKPEPSSSVAPLRDESGIQHPHTNYYVVYNGPHAGIYDDWGCTKAATNGVPGVAHKKFATITEARAAADAYTTSQQTDRLNFIPKGEAQLKPKSFAKALTSPPKQKAHWLMLGTKKPSSDPAPKEISFAPEITMDDFLYLYDLVRKFDGEGDDTMFTTDNEKISLFNFRKNANPQMVREAYAAGLIKTIYPSNNLQEIKYLPKKVKDAVKRFRTNCIKNTEKDIFLKIRSTIPVWTIQGLLHKPRQVIEIGVSKKVVPTESKAMESKIQIEDLTELAVKTGEQFIQSLLRLNDKKKIFVNMVEHDTLVYSKNIKDTVSEDQRAIETFQQRVISGNLLGFHCPAICHFIVKIVEKEGGSYKCHHCDKGKAIVEDASADSGPKDGPPPTRSIVEKEDVPTTSSKQVDMSITGQPHVYKKDTIIRLKPLSLNSNNRSYVFSSSKGNIQNIINHLNNLNEIVGRSLLGIWKINSYFGLSKDPSESKSKNPSVFNTAKTIFKSGGVDYSSQLKEIKSLLEAQNTRIKSLEKAIQSLENKIEPEPLTKEEVKELKESINSIKEGLKNIIGMDHLLLKTQTQTEQVMNVTNPNSIYIKGRLYFKGYKKIELHCFVDTGASLCIASKFVIPEEHWVNAERPIMVKIADGSSITISKVCKDIDLIIAGEIFRIPTVYQQESGIDFIIGNNFCQLYEPFIQFTDRVIFTKNKSYPVHIAKLTRAVRVGTEGFLESMKKRSKTQQPEPVNISTNKIENPLEEIAILSEGRRLSEEKLFITQQRMQKIEELLEKVCSENPLDPNKTKQWMKASIKLSDPSKAIKVKPMKYSPMDREEFDKQIKELLDLKVIKPSKSPHMAPAFLVNNEAEKRRGKKRMVVNYKAMNKATVGDAYNLPNKDELLTLIRGKKIFSSFDCKSGFWQVLLDQESRPLTAFTCPQGHYEWNVVPFGLKQAPSIFQRHMDEAFRVFRKFCCVYVDDILVFSNNEEDHLLHVAMILQKCNQHGIILSKKKAQLFKKKINFLGLEIDEGTHKPQGHILEHINKFPDTLEDKKQLQRFLGILTYASDYIPKLAQIRKPLQAKLKENVPWRWTKEDTLYMQKVKKNLQGFPPLHHPLPEEKLIIETDASDDYWGGMLKAIKINEGTNTELICRYASGSFKAAEKNYHSNDKETLAVINTIKKFSIYLTPVHFLIRTDNTHFKSFVNLNYKGDSKLGRNIRWQAWLSHYSFDVEHIKGTDNHFADFLSREFNKVNSMANLNQIQKEVSEILSDQKSMKADIKAILELLGSQNPIKESLETVAAKIVNDLTKLINDCPCNKEILEALGTQPKEQLIEQPKEKGKGLNLGKYSYPNYGVGNEELGSSGNPKALTWPFKAPAGWPNQFMDLYPEENTQSEQSQNSENNMQIFKSENSDGFSSDLMISNDQLKNISKTQLTLEKEKIFKMPNVLSQVMKKAFSRKNEILYCVSTKELSVDIHDATGKVYLPLITKEEINKRLSSLKPEVRKTMSMVHLGAVKILLKAQFRNGIDTPIKIALIDDRINSRRDCLLGAAKGNLAYGKFMFTVYPKFGISLNTQRLNQTLSLIHDFENKNLMNKGDKVMTITYVVGYALTNSHHSIDYQSNATIELEDVFQEIGNVQQSEFCTIQNDECNWAIDIAQNKALLGAKTKTQIGNNLQIGNSASSSNTENELARVSQNIDLLKNKLKEICGE

SEQ ID NO: 443 - protein, 893 aa, Artificial Sequence
  Synthetic Polypeptide
MARYVVCWMFTINNPTTLPVMRDEIKYMVYQVERGQEGTRHVQGYVEMKRRSSLKQMRGFFPGAHLEKRKGSQEEARSYCMKEDTRIEGPFEFGSFKLSCNDNLFDVIQDMRETHKRPLEYLYDCPNTFDRSKDTLYRVQAEMNKTKAMNSWRTSFSAWTSEVENIMAQPCHRRIIWVYGPNGGEGKTTYAKHLMKTRNAFYSPGGKSLDICRLYNYEDIVIFDIPRCKEDYLNYGLLEEFKNGIIQSGKYEPVLKIVEYVEVIVMANFLPKEGIFSEDRIKLVSCMDWAESQFKTCTHGCDWKKISSDSADNRQYVPCVDSGAGRKSPRKVLLRSIEAVFNGSFSGNNRNVRGFLYVSIRDDDGEMRPVLIVPFGGYGYHNDFYYFEGKGKVECDISSDYVAPGIDWSRDMEVSISNSNNCNELCDLKCYVVCSLRIKEMFRQEMARYPKKSIKKRRVGRRKYGSKAATSHDYSSSGSILVPENTVKVFRIEPTDKTLPRYFIWKMFMLLVCKVKPGRILHWAMIKSSWEINQPTTCLEAPGLFIKPEHSHLVKLVCSGELEAGVATGTSDVECLLRKTTVLRKNVTEVDYLYLAFYCSSGVSINYQNRITYHVMEFWESSAMPDDVKREIKEIYWEDRKKLLFCQKLKSYVRRILVYGDQEDALAGVKDMKTSIIRYSEYLKKPCVVICCVSNKSIVYRLNSMVFFYHEYLEELGGDYSVYQDLYCDEVLSSSSTEEEDVGVIYRNVIMASTQEKFSWSDCQQIVISDYDVTLLMALTTERVKLFFEWFLFFGAIFIAITILYILLVLLFEVPRYIKELVRCLVEYLTRRRVWMQRTQLTEATGDVEIGRGIVEDRRDQEPAVIPHVSQVIPSQPNRRDDQGRRGNAGPMF

SEQ ID NO: 444 - protein, 821 aa, Artificial Sequence
  Synthetic Polypeptide
MPTVISASVAPRTAAEPRSPGPVPHPAQSKATEAGGGNPSGIYSAIISRNFPIIGVKEKTFEQLHKKCLEKKVLYVDPEFPPDETSLFYSQKFPIQFVWKRPPEICENPRFIIDGANRTDICQGELGDCWFLAAIACLTLNQHLLFRVIPHDQSFIENYAGIFHFQFWRYGEWVDVVIDDCLPTYNNQLVFTKSNHRNEFWSALLEKAYAKLHGSYEALKGGNTTEAMEDFTGGVAEFFEIRDAPSDMYKIMKKAIERGSLMGCSIDDGTNMTYGTSPSGLNMGELIARMVRNMDNSLLQDSDLDPRGSDERPTRTIIPVQYETRMACGLVRGHAYSVTGLDEVPFKGEKVKLVRLRNPWGQVEWNGSWSDRWKDWSFVDKDEKARLQHQVTEDGEFWMSYEDFIYHFTKLEICNLTADALQSDKLQTWTVSVNEGRWVRGCSAGGCRNFPDTFWTNPQYRLKLLEEDDDPDDSEVICSFLVALMQKNRRKDRKLGASLFTIGFAIYEVPKEMHGNKQHLQKDFFLYNASKARSKTYINMREVSQRFRLPPSEYVIVPSTYEPHQEGEFILRVFSEKRNLSEEVENTISVDRPVKKKKTKPIIFVSDRANSNKELGVDQESEEGKGKTSPDKQKQSPQPQPGSSDQESEEQQQFRNIFKQIAGDDMEICADELKKVLNTVVNKHKDLKTHGFTLESCRSMIALMDTDGSGKLNLQEFHHLWNKIKAWQKIFKHYDTDQSGTINSYEMRNAVNDAGFHLNNQLYDIITMRYADKHMNIDFDSFICCFVRLEGMFRAFHAFDKDGDGIIKLNVLEWLQLTMYA

SEQ ID NO: 445 - protein, 404 aa, Artificial Sequence
  Synthetic Polypeptide
MADKVLKEKRKLFIRSMGEGTINGLLDELLQTRVLNKEEMEKVKRENATVMDKTRALIDSVIPKGAQACQICITYICEEDSYLAGTLGLSADQTSGNYLNMQDSQGVLSSFPAPQAVQDNPAMPTSSGSEGNVKLCSLEEAQRIWKQKSAEIYPIMDKSSRTRLALIICNEEFDSIPRRTGAEVDITGMTMLLQNLGYSVDVKKNLTASDMTTELEAFAHRPEHKTSDSTFLVFMSHGIREGICGKKHSEQVPDILQLNAIFNMLNTKNCPSLKDKPKVIIIQACRGDSPGVVWFKDSVGVSGNLSLPTTEEFEDDAIKKAHIEKDFIAFCSSTPDNVSWRHPTMGSVFIGRLIEHMQEYACSCDVEEIFRKVRFSFEQPDGRAQMPTTERVTLTRCFYLFPGH

SEQ ID NO: 446 - protein, 1328 aa, Artificial Sequence
  Synthetic Polypeptide
MWRRKHPRTSGGTRGVLSGNRGVEYGSGRGHLGTFEGRWRKLPKMPEAVGTDPSTSRKMAELEEVTLDGKPLQALRVTDLKAALEQRGLAKSGQKSALVKRLKGALMLENLQKHSTPHAAFQPNSQIGEEMSQNSFIKQYLEKQQELLRQRLEREAREAAELEEASAESEDEMIHPEGVASLLPPDFQSSLERPELELSRHSPRKSSSISEEKGDSDDEKPRKGERRSSRVRQARAAKLSEGSQPAEEEEDQETPSRNLRVRADRNLKTEEEEEEEEEEEEDDEEEEGDDEGQKSREAPILKEFKEEGEEIPRVKPEEMMDERPKTRSQEQEVLERGGRFTRSQEEARKSHLARQQQEKEMKTTSPLEEEEREIKSSQGLKEKSKSPSPPRLTEDRKKASLVALPEQTASEEETPPPLLTKEASSPPPHPQLHSEEEIEPMEGPAPPVLIQLSPPNTDADTRELLVSQHTVQLVGGLSPLSSPSDTKAESPAEKVPEESVLPLVQKSTLADYSAQKDLEPESDRSAQPLPLKIEELALAKGITEECLKQPSLEQKEGRRASHTLLPSHRLKQSADSSSSRSSSSSSSSSRSRSRSPDSSGSRSHSPLRSKQRDVAQARTHANPRGRPKMGSRSTSESRSRSRSRSRSASSNSRKSLSPGVSRDSSTSYTETKDPSSGQEVATPPVPQLQVCEPKERTSTSSSSVQARRLSQPESAEKHVTQRLQPERGSPKKCEAEEAEPPAATQPQTSETQTSHLPESERIHHTVEEKEEVTMDTSENRPENDVPEPPMPIADQVSNDDRPEGSVEDEEKKESSLPKSFKRKISVVSTKGVPAGNSDTEGGQPGRKRRWGASTATTQKKPSISITTESLKEAVVDLHADDSRISEDETERNGDDGTHDKGLKICRTVTQVVPAEGQENGQREEEEEEKEPEAEPPVPPQVSVEVALPPPAEHEVKKVTLGDTLTRRSISQQKSGVSITIDDPVRTAQVPSPPRGKISNIVHISNLVRPFTLGQLKELLGRTGTLVEEAFWIDKIKSHCFVTYSTVEEAVATRTALHGVKWPQSNPKFLCADYAEQDELDYHRGLLVDRPSETKTEEQGIPRPLHPPPPPPVQPPQHPRAEQREQERAVREQWAEREREMERRERTRSEREWDRDKVREGPRSRSRSRDRRRKERAKSKEKKSEKKEKAQEEPPAKLLDDLFRKTKAAPCIYWLPLTDSQIVQKEAERAERAKEREKRRKEQEEEEQKEREKEAERERNRQLEREKRREHSRERDRERERERERDRGDRDRDRERDRERGRERDRRDTKRHSRSRSRSTPVRDRGGRR

SEQ ID NO: 447 - protein, 277 aa, Artificial Sequence
  Synthetic Polypeptide
MENTENSVDSKSIKNLEPKIIHGSESMDSGISLDNSYKMDYPEMGLCIIINNKNFHKSTGMTSRSGTDVDAANLRETFRNLKYEVRNKNDLTREEIVELMRDVSKEDHSKRSSFVCVLLSHGEEGIIFGTNGPVDLKKITNFFRGDRCRSLTGKPKLFIIQACRGTELDCGIETDSGVDDDMACHKIPVEADFLYAYSTAPGYYSWRNSKDGSWFIQSLCAMLKQYADKLEFMHILTRVNRKVATEFESFSFDATFHAKKQIPCIVSMLTKELYFYH

SEQ ID NO: 448 - protein, 377 aa, Artificial Sequence
  Synthetic Polypeptide
MAEGNHRKKPLKVLESLGKDFLTGVLDNLVEQNVLNWKEEEKKKYYDAKTEDKVRVMADSMQEKQRMAGQMLLQTFFNIDQISPNKKAHPNMEAGPPESGESTDALKLCPHEEFLRLCKERAEEIYPIKERNNRTRLALIICNTEFDHLPPRNGADFDITGMKELLEGLDYSVDVEENLTARDMESALRAFATRPEHKSSDSTFLVLMSHGILEGICGTVHDEKKPDVLLYDTIFQIFNNRNCLSLKDKPKVIIVQACRGANRGELWVRDSPASLEVASSQSSENLEEDAVYKTHVEKDFIAFCSSTPHNVSWRDSTMGSIFITQLITCFQKYSWCCHLEEVFRKVQQSFETPRAKAQMPTIERLSMTRYFYLFPGN

SEQ ID NO: 449 - protein, 434 aa, Artificial Sequence
  Synthetic Polypeptide
MAEDSGKKKRRKNFEAMFKGILQSGLDNFVINHMLKNNVAGQTSIQTLVPNTDQKSTSVKKDNHKKKTVKMLEYLGKDVLHGVFNYLAKHDVLTLKEEEKKKYYDTKIEDKALILVDSLRKNRVAHQMFTQTLLNMDQKITSVKPLLQIEAGPPESAESTNILKLCPREEFLRLCKKNHDEIYPIKKREDRRRLALIICNTKFDHLPARNGAHYDIVGMKRLLQGLGYTVVDEKNLTARDMESVLRAFAARPEHKSSDSTFLVLMSHGILEGICGTAHKKKKPDVLLYDTIFQIFNNRNCLSLKDKPKVIIVQACRGEKHGELWVRDSPASLALISSQSSENLEADSVCKIHEEKDFIAFCSSTPHNVSWRDRTRGSIFITELITCFQKYSCCCHLMEIFRKVQKSFEVPQAKAQMPTIERATLTRDFYLFPGN

SEQ ID NO: 450 - protein, 479 aa, Artificial Sequence [sequence omitted]

SEQ ID NO: 451 - protein, 522 aa, Artificial Sequence
  Synthetic Polypeptide
MKSQGQHWYSSSDKNCKVSFREKLLIIDSNLGVQDVENLKFLCIGLVPNKKLEKSSSASDVFEHLLAEDLLSEEDPFFLAELLYIIRQKKLLQHLNCTKEEVERLLPTRQRVSLFRNLLYELSEGIDSENLKDMIFLLKDSLPKTEMTSLSFLAFLEKQGKIDEDNLTCLEDLCKTVVPKLLRNIEKYKREKAIQIVTPPVDKEAESYQGEEELVSQTDVKTFLEALPQESWQNKHAGSNGNRATNGAPSLVSRGMQGASANTLNSETSTKRAAVYRMNRNHRGLCVIVNNHSFTSLKDRQGTHKDAEILSHVFQWLGFTVHIHNNVTKVEMEMVLQKQKCNPAHADGDCFVFCILTHGRFGAVYSSDEALIPIREIMSHFTALQCPRLAEKPKLFFIQACQGEEIQPSVSIEADALNPEQAPTSLQDSIPAEADFLLGLATVPGYVSFRHVEEGSWYIQSLCNHLKKLVPRHEDILSILTAVNDDVSRRVDKQGTKKQMPQPAFTLRKKLVFPVPLDALSL

SEQ ID NO: 452 - protein, 296 aa, Artificial Sequence
  Synthetic Polypeptide
MHRRRSRSCREDQKPVMDDQRDLISNNEQLPMLGRRPGAPESKCSRGALYTGFSILVTLLLAGQATTAYFLYQQQGRLDKLTVTSQNLQLENLRMKLPKPPKPVSKMRMATPLLMQALPMGALPQGPMQNATKYGNMTEDHVMHLLQNADPLKVYPPLKGSFPENLRHLKNTMETIDWKVFESWMHHWLLFEMSRHSLEQKPTDAPPKVLTKCQEEVSHIPAVHPGSFRPKCDENGNYLPLQCYGSIGYCWCVFPNGTEVPNTRSRGHHNCSESLELEDPSSGLGVTKQDLGPVPM

SEQ ID NO: 453 - protein, 208 aa, Artificial Sequence
  Synthetic Polypeptide
MDPFLVLLHSVSSSLSSSELTELKFLCLGRVGKRKLERVQSGLDLFSMLLEQNDLEPGHTELLRELLASLRRHDLLRRVDDFEAGAAAGAAPGEEDLCAAFNVICDNVGKDWRRLARQLKVSDTKIDSIEDRYPRNLTERVRESLRIWKNTEKENATVAHLVGALRSCQMNLVADLVQEVQQARDLQNRSGAMSPMSWNSDASTSEAS

SEQ ID NO: 454 - protein, 335 aa, Artificial Sequence
  Synthetic Polypeptide
MLGIWTLLPLVLTSVARLSSKSVNAQVTDINSKGLELRKTVTTVETQNLEGLHHDGQFCHKPCPPGERKARDCTVNGDEPDCVPCQEGKEYTDKAHFSSKCRRCRLCDEGHGLEVEINCTRTQNTKCRCKPNFFCNSTVCEHCDPCTKCEHGIIKECTLTSNTKCKEEGSRSNLGWLCLLLLPIPLIVWVKRKEVQKTCRKHRKENQGSHESPTLNPETVAINLSDVDLSKYITTIAGVMTLSQVKGFVRKNGVNEAKIDEIKNDNVQDTAEQKVQLLRNWHQLHGKKEAYDTLIKDLKKANLCTLAEKIQTIILKDITSDSENSNFRNEIQSLV

SEQ ID NO: 455 - protein, 281 aa, Artificial Sequence
  Synthetic Polypeptide
MQQPFNYPYPQIYWVDSSASSPWAPPGTVLPCPTSVPRRPGQRRPPPPPPPPPLPPPPPPPPLPPLPLPPLKKRGNHSTGLCLLVMFFMVLVALVGLGLGMFQLFHLQKELAELRESTSQMHTASSLEKQIGHPSPPPEKKELRKVAHLTGKSNSRSMPLEWEDTYGIVLLSGVKYKKGGLVINETGLYFVYSKVYFRGQSCNNLPLSHKVYMRNSKYPQDLVMMEGKMMSYCTTGQMWARSSYLGAVFNLTSADHLYVNVSELSLVNFEESQTFFGLYKL

SEQ ID NO: 456 - protein, 247 aa, Artificial Sequence [sequence omitted]

SEQ ID NO: 457 - protein, 671 aa, Artificial Sequence
  Synthetic Polypeptide
MQPDMSLNVIKMKSSDFLESAELDSGGFGKVSLCFHRTQGLMIMKTVYKGPNCIEHNEALLEEAKMMNRLRHSRVVKLLGVIIEEGKYSLVMEYMEKGNLMHVLKAEMSTPLSVKGRIILEIIEGMCYLHGKGVIHKDLKPENILVDNDFHIKIADLGLASFKMWSKLNNEEHNELREVDGTAKKNGGTLYYMAPEHLNDVNAKPTEKSDVYSFAVVLWAIFANKEPYENAICEQQLIMCIKSGNRPDVDDITEYCPREIISLMKLCWEANPEARPTFPGIEEKFRPFYLSQLEESVEEDVKSLKKEYSNENAVVKRMQSLQLDCVAVPSSRSNSATEQPGSLHSSQGLGMGPVEESWFAPSLEHPQEENEPSLQSKLQDEANYHLYGSRMDRQTKQQPRQNVAYNREEERRRRVSHDPFAQQRPYENFQNTEGKGTAYSSAASHGNAVHQPSGLTSQPQVLYQNNGLYSSHGFGTRPLDPGTAGPRVWYRPIPSHMPSLHNIPVPETNYLGNTPTMPFSSLPPTDESIKYTIYNSTGIQIGAYNYMEIGGTSSSLLDSTNTNFKEEPAAKYQAIFDNTTSLTDKHLDPIRENLGKHWKNCARKLGFTQSQIDEIDHDYERDGLKEKVYQMLQKWVMREGIKGATVGKLAQALHQCSRIDLLSSLIYVSQN

SEQ ID NO: 458 - protein, 540 aa, Artificial Sequence
  Synthetic Polypeptide
MNGEAICSALPTIPYHKLADLRYLSRGASGTVSSARHADWRVQVAVKHLHIHTPLLDSERKDVLREAEILHKARFSYILPILGICNEPEFLGIVTEYMPNGSLNELLHRKTEYPDVAWPLRFRILHEIALGVNYLHNMTPPLLHHDLKTQNILLDNEFHVKIADFGLSKWRMMSLSQSRSSKSAPEGGTIIYMPPENYEPGQKSRASIKHDIYSYAVITWEVLSRKQPFEDVTNPLQIMYSVSQGHRPVINEESLPYDIPHRARMISLIESGWAQNPDERPSFLKCLIELEPVLRTFEEITFLEAVIQLKKTKLQSVSSAIHLCDKKKMELSLNIPVNHGPQEESCGSSQLHENSGSPETSRSLPAPQDNDFLSRKAQDCYFMKLHHCPGNHSWDSTISGSQRAAFCDHKTTPCSSAIINPLSTAGNSERLQPGIAQQWIQSKREDIVNQMTEACLNQSLDALLSRDLIMKEDYELVSTKPTRTSKVRQLLDTTDIQGEEFAKVIVQKLKDNKQMGLQPYPEILVVSRSPSLNLLQNKSM

SEQ ID NO: 459 - protein, 518 aa, Artificial Sequence
  Synthetic Polypeptide
MSCVKLWPSGAPAPLVSIEELENQELVGKGGFGTVFRAQHRKWGYDVAVKIVNSKAISREVKAMASLDNEFVLRLEGVIEKVNWDQDPKPALVTKFMENGSLSGLLQSQCPRPWPLLCRLLKEVVLGMFYLHDQNPVLLHRDLKPSNVLLDPELHVKLADFGLSTFQGGSQSGTGSGEPGGTLGYLAPELFVNVNRKASTASDVYSFGILMWAVLAGREVELPTEPSLVYEAVCNRQNRPSLAELPQAGPETPGLEGLKELMQLCWSSEPKDRPSFQECLPKTDEVFQMVENNMNAAVSTVKDFLSQLRSSNRRFSIPESGQGGTEMDGFRRTIENQHSRNDVMVSEWLNKLNLEEPPSSVPKKCPSLTKRSRAQEEQVPQAWTAGTSSDSMAQPPQTPETSTFRNQMPSPTSTGTPSPGPRGNQGAERQGMNWSCRTPEPNPVTGRPLVNIYNCSGVQVGDNNYLTMQQTTALPTWGLAPSGKGRGLQHPPPVGSQEGPKDPEAWSRPQGWYNHSGK

SEQ ID NO: 460 - protein, 390 aa, Artificial Sequence
  Synthetic Polypeptide
MNSLSEANTKFMFDLFQQFRKSKENNIFYSPISITSALGMVLLGAKDNTAQQISKVLHFDQVTENTTEKAATYHVDRSGNVHHQFQKLLTEFNKSTDAYELKIANKLFGEKTYQFLQEYLDAIKKFYQTSVESTDFANAPEESRKKINSWVESQTNEKIKNLFPDGTIGNDTTLVLVNAIYFKGQWENKFKKENTKEEKFWPNKNTYKSVQMMRQYNSFNFALLEDVQAKVLEIPYKGKDLSMIVLLPNEIDGLQKLEEKLTAEKLMEWTSLQNMRETCVDLHLPRFKMEESYDLKDTLRTMGMVNIFNGDADLSGMTWSHGLSVSKVLHKAFVEVTEEGVEAAAATAVVVVELSSPSTNEEFCCNHPFLFFIRQNKTNSILFYGRFSSP

SEQ ID NO: 461 - protein, 390 aa, Artificial Sequence; identical to SEQ ID NO: 460
  Synthetic Polypeptide

SEQ ID NO: 462 - protein, 376 aa, Artificial Sequence
  Synthetic Polypeptide
METLSNASGTFAIRLLKILCQDNPSHNVFCSPVSISSALAMVLLGAKGNTATQMAQALSLNTEEDIHRAFQSLLTEVNKAGTQYLLRTANRLFGEKTCQFLSTFKESCLQFYHAELKELSFIRAAEESRKHINTWVSKKTEGKIEELLPGSSIDAETRLVLVNAIYFKGKWNEPFDETYTREMPFKINQEEQRPVQMMYQEATFKLAHVGEVRAQLLELPYARKELSLLVLLPDDGVELSTVEKSLTFEKLTAWTKPDCMKSTEVEVLLPKFKLQEDYDMESVLRHLGIVDAFQQGKADLSAMSAERDLCLSKFVHKSFVEVNEEGTEAAAASSCFVVAECCMESGPRFCADHPFLFFIRHNRANSILFCGRFSSP

SEQ ID NO: 463 - protein, 397 aa, Artificial Sequence
  Synthetic Polypeptide
MDSLATSINQFALELSKKLAESAQGKNIFFSSWSISTSLTIVYLGAKGTTAAQMAQVLQFNRDQGVKCDPESEKKRKMEFNLSNSEEIHSDFQTLISEILKPNDDYLLKTANAIYGEKTYAFHNKYLEDMKTYFGAEPQPVNFVEASDQIRKDINSWVERQTEGKIQNLLPDDSVDSTTRMILVNALYFKGIWEHQFLVQNTTEKPFRINETTSKPVQMMFMKKKLHIFHIEKPKAVGLQLYYKSRDLSLLILLPEDINGLEQLEKAITYEKLNEWTSADMMELYEVQLHLPKFKLEDSYDLKSTLSSMGMSDAFSQSKADFSGMSSARNLFLSNVFHKAFVEINEQGTEAAAGSGSEIDIRIRVPSIEFNANHPFLFFIRHNKTNTILFYGRLCSP

SEQ ID NO: 464 - protein, 182 aa, Artificial Sequence
  Synthetic Polypeptide
MVTRDVLLAIETHLNQNEKTFVMYFLLDPYIPKECEDFLPTLENLHSKRKIIYPILIELMYILQRFDLLRSIFLLDHRFVKDQITSSHWNYISPYKQLIFSIGQNIDDEDLISIKFISMNYIGKSPSKIKNYLDWVRALEKVAMVGPDNLDLFETLFKQIHRMDIVKMIKNYRTRETLQITL

SEQ ID NO: 465 - protein, 499 aa, Artificial Sequence
  Synthetic Polypeptide
MDIFREIASSMKGENVFISPPSISSVLTILYYGANGSTAEQLSKYVEKEADKNKDDISFKSMNKVYGRYSAVFKDSFLRKIGDNFQTVDFTDCRTVDAINKCVDIFTEGKINPLLDEPLSPDTCLLAISAVYFKAKWLMPFEKEFTSDYPFYVSPTEMVDVSMMSMYGEAFNHASVKESFGNFSIIELPYVGDTSMVVILPDNIDGLESIEQNLTDTNFKKWCDSMDAMFIDVHIPKFKVTGSYNLVDALVKLGLTEVFGSTGDYSNMCNSDVSVDAMIHKTYIDVNEEYTEAAAATCALVADCASTVTNEFCADHPFIYVIRHVDGKILFVGRYCSPTTNMHQKRTAMFQDPQERPRKLPQLCTELQTTIHDIILECVYCKQQLLRREVYDFAFRDLCIVYRDGNPYAVCDKCLKFYSKISEYRHYCYSLYGTTLEQQYNKPLCDLLIRCINCQKPLCPEEKQRHLDKKQRFHNIRGRWTGRCMSCCRSSRTRRETQL

SEQ ID NO: 466 - protein, 105 aa, Artificial Sequence
  Synthetic Polypeptide
MSNGAADRARLRHLDHCRQPHCFARDICVFTYFELPEEHPQGPAHGVRITVEKGIDTHLIKFFTKRPLLVEKDQGNTILTLYCICPVPGLHEDFCCHLCAEFNHL

SEQ ID NO: 467 - protein, 264 aa, Artificial Sequence
  Synthetic Polypeptide
MKISAVICVLNLIICSGAVPPEEEPNCHPHLSNIKINLSIPHITLRCSFFSTHLTWTFNGKHVTNTDIKFKLHKENITLFQPINLGYYRCSAPPCTQAFFVAPVIDKRPAPTTAAVTEHITEAVSPSKGTEEIVYFSNFTNHLVLNCSCSNSLISWFANSSLCKTFYQGKLLYSAKLTLCNQSTPSHLTLLPPFVAGRYFCIGAARTSPCQQHWNLTYCPPPVSPFVINTEYLDYNPLLAYGGLAALILFLISNLFLVQHLYSY

SEQ ID NO: 468 - protein, 268 aa, Artificial Sequence
  Synthetic Polypeptide
MLSIFLLFLFSLPSGLYAQTAERPLKVVVEAGHNVTLPHLSGSHQTGHVTWLVETSDYGSASPDNFIFSGQKLCQFTDRTMVWPYYNLHFNCENYDLNLFWLKVENSAIYNVKNTVNASETNIYYDLRVVQIFPPKCIITSKYLTNDYCHITINCTNSDYPNKVVFNNVSRWYYGYGKGSPTLPNYFITNFNVSGITKSFNHTYPFNELCDYPTSQSQHSLTHTVSTVIFLGIIGFSILIIIAAFIYLCWHRKSLCVSKTEPLMPIPY

SEQ ID NO: 469 - protein, 110 aa, Artificial Sequence
  Synthetic Polypeptide
MKTALVLFFMLIPVWASSCQLHKPWNFLDCYTKETNYIGWVYGIMSGLVFVSSVVSLQLYARLNFSWNKYTDDLPEYPNPQDDLPLNIVFPEPPRPPSVVSYFKFTGEDD

SEQ ID NO: 470 - protein, 128 aa, Artificial Sequence
  Synthetic Polypeptide
MIEPDLEIDGRITEQRLLTDRARRRQQDQKNKELIDLQTVHQCKKGLFCLVKQATLRYESLPGKEHQLCYTLPTQRQTFTAMVGSVPIKVSQQAGEQEGSIRCLCDNPECLYTLIKTLCGLRNLLPMN

SEQ ID NO: 471 - protein, 188 aa, Artificial Sequence
  Synthetic Polypeptide
MATYEVLCEVARKLGTDDREVVLFLLNVFIPQPTLAQLIGALRALKEEGRLTFPLLAECLFRAGRRDLLRDLLHLDPRFLERHLAGTMSYFSPYQLTVLHVDGELCARDIRSLIFLSKDTIGSRSTPQTFLHWVYCMENLDLLGPTDVDALMSMLRSLSRVDLQRQVQTLMGLHLSGPSHSQHYRHTP

SEQ ID NO: 472 - protein, 241 aa, Artificial Sequence
  Synthetic Polypeptide
MSDSKEVPSLPFLRHLLEELDSHEDSLLLFLCHDAAPGCTTVTQALCSLSQQRKLTLAALVEMLYVLQRMDLLKSRFGLSKEGAEQLLGTSFLTRYRKLMVCVGEELDSSELRALRLFACNLNPSLSTALSESSRFVELVLALENVGLVSPSSVSVLADMLRTLRRLDLCQQLVEYEQQEQARYRYCYAASPSLPVRTLRRGHGASEHEQLCMPVQESSDSPELLRTPVQESSSDSPEQTT

SEQ ID NO: 473 - protein, 299 aa, Artificial Sequence
  Synthetic Polypeptide
MCVIFPVEIDVSQTIIRDCQVDKQTRELVYINKIMNTQLTKPVLMMFNISGPIRSVTRKNNNLRDRIKSKVDEQFDQLERDYSDQMDGFHDSIKYFKDEHYSVSCQNGSVLKSKFAKILKSHDYTDKKSIEAYEKYCLPKLVDERNDYYVAVCVLKPGFENGSNQVLSFEYNPIGNKVIVPFAHEINDTGLYEYDVVAYVDSVQFDGEQFEEFVQSLILPSSFKNSEKVLYYNEASKNKSMIYKALEFTTESSWGKSEKYNWKIFCNGFIYDKKSKVLYVKLHNVTSALNKNVILNTIK

SEQ ID NO: 474 - protein, 333 aa, Artificial Sequence
  Synthetic Polypeptide
MELFKHFLQSTASDVFVSPVSISAVLAVLLEGAKGRTAAQLRLALEPRYSHLDKVTVASRVYGDWRLDIKPKFMQAVRDRFELVNFNHSPEKIKDDINRWVAARTNNKILNAVNSISPDTKLLIVAAIYFEVAWRNQFVPDFTIEGEFWVTKDVSKTVRMMTLSDDFRFVDVRNEGIKMIELPYEYGYSMLVIIPDDLEQVERHLSLMKVISWLKMSTLRYVHLSFPKFKMETSYTLNEALATSGVTDIFAHPNFEDMTDDKNVAVSDIFHKAYIEVTEFGTTAASCTYGCVTDFGGTMDPVVLKVNKPFIFIIKHDDTFSLLFLGRVTSPNY

SEQ ID NO: 475 - protein, 1137 aa, Artificial Sequence
  Synthetic Polypeptide
MASRPAASSPVEARAPVGGQEAGGPSAATQGEAAGAPLAHGHHVYCQRVNGVMVLSDKTPGSASYRISDNNFVQCGSNCTMIIDGDVVRGRPQDPGAAASPAPFVAVTNIGAGSDGGTAVVAFGGTPRRSAGTSTGTQTADVPTEALGGPPPPPRFTLGGGCCSCRDTRRRSAVFGGEGDPVGPAEFVSDDRSSDSDSDDSEDTDSETLSHASSDVSGGATYDDALDSDSSSDDSLQIDGPVCRPWSNDTAPLDVCPGTPGPGADAGGPSAVDPHAPTPEAGAGLAADPAVARDDAEGLSDPRPRLGTGTAYPVPLELTPENAEAVARFLGDAVNREPALMLEYFCRCAREETKRVPPRTFGSPPRLTEDDFGLLNYALVEMQRLCLDVPPVPPNAYMPYYLREYVTRLVNGFKPLVSRSARLYRILGVLVHLRIRTREASFEEWLRSKEVALDFGLTERLREHEAQLVILAQALDHYDCLIHSTPHTLVERGLQSALKYEEFYLKRFGGHYMESVFQMYTRIAGFLACRATRGMRHIALGREGSWWEMFKFFFHRLYDHQIVPSTPAMLNLGTRNYYTSSCYLVNPQATTNKATLRAITSNVSAILARNGGIGLCVQAFNDSGPGTASVMPALKVLDSLVAAHNKESARPTGACVYLEPWHTDVRAVLRMKGVLAGEEAQRCDNIFSALWMPDLFFKRLIRHLDGEKNVTWTLFDRDTSMSLADFHGEEFEKLYQHLEVMGFGEQIPIQELAYGIVRSAATTGSPFVMFKDAVNRHYIYDTQGAAIAGSNLCTEIVHPASKRSSGVCNLGSVNLARCVSRQTFDFGRLRDAVQACVLMVNIMIDSTLQPTPQCTRGNDNLRSMGIGMQGLHTACLKLGLDLESAEFQDLNKHIAEVMLLSAMKTSNALCVRGARPFNHFKRSMYRAGRFHWERFPDARPRYEGEWEMLRQSMMKHGLRNSQFVALMPTAASAQISDVSEGFAPLFTNLFSKVTRDGETLRPNTLLLKELERTFSGKRLLEVMDSLDAKQWSVAQALPCLEPTHPLRRFKTAFDYDQKLLIDLCADRAPYVDHSQSMTLYVTEKADGTLPASTLVRLLVHAYKRGLKTGMYYCKVRKATNSGVFGGDDNIVCMSCAL

SEQ ID NO: 476 - protein, 476 aa, Artificial Sequence
  Synthetic Polypeptide
MDDLRDTLMAYGCIAIRAGDFNGLNDFLEQECGTRLHVAWPERCFIQLRSRSALGPFVGKMGTVCSQGAYVCCQEYLHPFGFVEGPGFMRYQLIVLIGQRGGIYCYDDLRDCIYELAPTMKDFLRHGFRHCDHFHTMRDYQRPMVQYDDYWNAVMLYRGDVESLSAEVTKRGYASYSIDDPFDECPDTHFAFWTHNTEVMKFKETSFSVVRAGGSIQTMELMIRTVPRITCYHQLLGALGHEVPERKEFLVRQYVLVDTFGVVYGYDPAMDAVYRLAEDVVMFTCVMGKKGHRNHRFSGRREAIVRLEKTPTCQHPKKTPDPMIMFDEDDDDELSLPRNVMTHEEAESRLYDAITENLMHCVKLVTTDSPLATHLWPQELQALCDSPALSLCTDDVEGVRQKLRARTGSLHHFELSYRFHDEDPETYMGFLWDIPSCDRCVRRRRFKVCDVGRRHIIPGAANGMPPLTPPHAYMNN

SEQ ID NO: 477 - protein, 1142 aa, Artificial Sequence
  Synthetic Polypeptide
MANRPAASALAGARSPSERQEPREPEVAPPGGDHVFCRKVSGVMVLSSDPPGPAAYRISDSSFVQCGSNCSMIIDGDVARGHLRDLEGATSTGAFVAISNVAAGGDGRTAVVALGGTSGPSATTSVGTQTSGEFLHGNPRTPEPQGPQAVPPPPPPPFPWGHECCARRDARGGAEKDVGAAESWSDGPSSDSETEDSDSSDEDTGSETLSRSSSIWAAGATDDDDSDSDSRSDDSVQPDVVVRRRWSDGPAPVAFPKPRRPGDSPGNPGLGAGTGPGSATDPRASADSDSAAHAAAPQADVAPVLDSQPTVGTDPGYPVPLELTPENAEAVARFLGDAVDREPALMLEYFCRCAREESKRVPPRTFGSAPRLTEDDFGLLNYALAEMRRLCLDLPPVPPNAYTPYHLREYATRLVNGFKPLVRRSARLYRILGVLVHLRIRTREASFEEWMRSKEVDLDFGLTERLREHEAQLMILAQALNPYDCLIHSTPNTLVERGLQSALKYEEFYLKRFGGHYMESVFQMYTRIAGFLACRATRGMRHIALGRQGSWWEMFKFFFHRLYDHQIVPSTPAMLNLGTRNYYTSSCYLVNPQATTNQATLRAITGNVSAILARNGGIGLCMQAFNDASPGTASIMPALKVLDSLVAAHNKQSTRPTGACVYLEPWHSDVRAVLRMKGVLAGEEAQRCDNIFSALWMPDLFFKRLIRHLDGEKNVTWSLFDRDTSMSLADFHGEEFEKLYEHLEAMGFGETIPIQDLAYAIVRSAATTGSPFIMFKDAVNRHYIYDTQGAAIAGSNLCTEIVHPASKRSSGVCNLGSVNLARCVSRQTFDFGRLRDAVQACVLMVNIMIDSTLQPTPQCTRGNDNLRSMGIGMQGLHTACLKMGLDLESAEFRDLNTHIAEVMLLAAMKTSNALCVRGARPFSHFKRSMYRAGRFHWERFSNASPRYEGEWEMLRQSMMKHGLRNSQFIALMPTAASAQISDVSEGFAPLFTNLFSKVTRDGETLRPNTLLLKELERTFGGKRLLDAMDGLEAKQWSVAQALPCLDPAHPLRRFKTAFDYDQELLIDLCADRAPYVDHSQSMTLYVTEKADGTLPASTLVRLLVHAYKRGLKTGMYYCKVRKATNSGVFAGDDNIVCTSCAL

SEQ ID NO: 478 - protein, 1174 aa, Artificial Sequence
  Synthetic Polypeptide
MDRQPKVYSDPDNGFFFLDVPMPDDGQGGQQTATTAAGGAFGVGGGHSVPYVRIMNGVSGIQIGNHNAMSIASCWSPSYTDRRRRSYPKTATNAAADRVAAAVSAANAAVNAAAAAAAAGGGGGANLLAAAVTCANQRGCCGGNGGHSLPPTRAPKTNATAAAAPAVAVASNAKSDNNHANAASGAGSAAATPAATTSAAAAVENRRPSPSPSTASTAPCDEGSSPRHHRPSHVSVGTQATPSTPIPIPAPRCSTGQQQQQPQAKKLKPAKADPLLYAATMPPPASVTTAAAAAVAPESESSPAASAPPAAAAMATGGDDEDQSSFSFVSDDVLGEFEDLRIAGLPVRDEMRPPTPTMTVIPVSRPFRAGRDSGRDALFDDAVESVRCYCHGILGNSRFCALVNEKCSEPAKERMARIRRYAADVTRCGPLALYTAIVSSANRLIQTDPSCDLDLAECYVETASKRNAVPLSAFYRDCDRLRDAVAAFFKTYGMVVDAMAQRITERVGPALGRGLYSTVVMMDRCGNSFQGREETPISVFARVAAALAVECEVDGGVSYKILSSKPVDAAQAFDAFLSALCSFAIIPSPRVLAYAGFGGSNPIFDAVSYRAQFYSAESTINGTLHDICDMVTNGLSVSVSAADLGGDIVASLHILGQQCKALRPYARFKTVLRIYFDIWSVDALKIFSFILDVGREYEGLMAFAVNTPRIFWDRYLDSSGDKMWLMFARREAAALCGLDLKSFRNVYEKMERDGRSAITVSPWWAVCQLDACVARGNTAVVFPHNVKSMIPENIGRPAVCGPGVSVVSGGFVGCTPIHELCINLENCVLEGAAVESSVDVVLGLGCRFSFKALESLVRDAVVLGNLLIDMTVRTNAYGAGKLLTLYRDLHIGVVGFHAVMNRLGQKFADMESYDLNQRIAEFIYYTAVRASVDLCMAGADPFPKFPKSLYAAGRFYPDLFDDDERGPRRMTKEFLEKLREDVVKHGIRNASFITGCSADEAANLAGTTPGFWPRRDNVFLEQTPLMMTPTKDQMLDECVRSVKIEPHRLHEEDLSCLGENRPVELPVLNSRLRQISKESATVAVRRGRSAPFYDDSDDEDEVACSETGWTVSTDAVIKMCVDRQPFVDHAQSLPVAIGFGGSSVELARHLRRGNALGLSVGVYKCSMPPSVNYR

SEQ ID NO: 479 - DNA, 9180 bp, Artificial Sequence
  Sythetic Oligonucleotide
ggtctctctggttagaccagatctgagcctgggagctctctggctaactagggaacccactgcttaagcccaataaagcttgccttgagtgcttcaagtagtgtgtgcccgtctgttgtgtgactctggtaactagagatccctcagacccttttagtcagtgtggaaaatctctagcagtggcgcccgaacagggacctgaaagcgaaagggaaaccagaggagctctctcgacgcaggactcggcttgctgaagcgcgcacggcaagaggcgaggggcggcgactggtgagtacgccaaaaattttgactagcggaggctagaaggagagagatgggtgcgagagcgtcagtattaagcgggggagaattagatcgatgggaaaaaattcggttaaggccagggggaaagaaaaaatataaattaaaacatatagtatgggcaagcagggagctagaacgattcgcagttaatcctggcctgttagaaacatcagaaggctgtagacaaatactgggacagctacaaccatcccttcagacaggatcagaagaacttagatcattatataatacagtagcaaccctctattgtgtgcatcaaaggatagagataaaagacaccaaggaagctttagacaagatagaggaagagcaaaacaaaagtaagaaaaaagcacagcaagcagcagctgacacaggacacagcaatcaggtcagccaaaattaccctatagtgcagaacatccaggggcaaatggtacatcaggccatatcacctagaactttaaatgcatgggtaaaagtagtagaagagaaggctttcagcccagaagtgatacccatgttttcagcattatcagaaggagccaccccacaagatttaaacaccatgctaaacacagtggggggacatcaagcagccatgcaaatgttaaaagagaccatcaatgaggaagctgcagaatgggatagagtgcatccagtgcatgcagggcctattgcaccaggccagatgagagaaccaaggggaagtgacatagcaggaactactagtacccttcaggaacaaataggatggatgacaaataatccacctatcccagtaggagaaatttataaaagatggataatcctgggattaaataaaatagtaagaatgtatagccctaccagcattctggacataagacaaggaccaaaggaaccctttagagactatgtagaccggttctataaaactctaagagccgagcaagcttcacaggaggtaaaaaattggatgacagaaaccttgttggtccaaaatgcgaacccagattgtaagactattttaaaagcattgggaccagcggctacactagaagaaatgatgacagcatgtcagggagtaggaggacccggccataaggcaagagttttggctgaagcaatgagccaagtaacaaattcagctaccataatgatgcagagaggcaattttaggaaccaaagaaagattgttaagtgtttcaattgtggcaaagaagggcacacagccagaaattgcagggcccctaggaaaaagggctgttggaaatgtggaaaggaaggacaccaaatgaaagattgtactgagagacaggctaattttttagggaagatctggccttcctacaagggaaggccagggaattttcttcagagcagaccagagccaacagccccaccagaagagagcttcaggtctggggtagagacaacaactccccctcagaagcaggagccgatagacaaggaactgtatcctttaacttccctcaggtcactctttggcaacgacccctcgtcacaataaagataggggggcaactaaaggaagctctattagatacaggagcagatgatacagtattagaagaaatgagtttgccaggaagatggaaaccaaaaatgatagggggaattggaggttttatcaaagtaagacagtatgatcagatactcatagaaatctgtggacataaagctataggtacagtattagtaggacctacacctgtcaacataattggaagaaatctgttgactcagattggttgcactttaaattttcccattagccctattgagactgtaccagtaaaattaaagccaggaatggatggcccaaaagttaaacaatggccattgacagaagaaaaaataaaagcattagtagaaatttgtacagagatggaaaaggaagggaaaatttcaaaaattgggcctgaaaatccatacaatactccagtatttgccataaagaaaaaagacagtactaaatggagaaaattagtagatttcagagaacttaataagagaactcaagacttctgggaagttcaattaggaataccacatcccgcagggttaaaaaagaaaaaatcagtaacagtactggatgtgggtgatgcatatttttcagttcccttagatgaagacttcaggaagtatactgcatttaccatacctagtataaacaatgagacaccagggattagatatcagtacaatgtgcttccacagggatggaaaggatcaccagcaatattccaaagtagcatgacaaaaatcttagagccttttagaaaacaaaatccagacatagttatctatcaatacatggatgatttgtatgtaggatctgacttagaaatagggcagcatagaacaaaaatagaggagctgagacaacatctgttgaggtggggacttaccacaccagacaaaaaacatcagaaagaacctccattcctttggatgggttatgaactccatcctgataaatggacagtacagcctatagtgctgccagaaaaagacagctggactgtcaatgacatacagaagttagtggggaaattgaattgggcaagtcagatttacccagggattaaagtaaggcaattatgtaaactccttagaggaaccaaagcactaacagaagtaataccactaacagaagaagcagagctagaactggcagaaaacagagagattctaaaagaaccagtacatggagtgtattatgacccatcaaaagacttaatagcagaaatacagaagcaggggcaaggccaatggacatatcaaatttatcaagagccatttaaaaatctgaaaacaggaaaatatgcaagaatgaggggtgcccacactaatgatgtaaaacaattaacagaggcagtgcaaaaaataaccacagaaagcatagtaatatggggaaagactcctaaatttaaactgcccatacaaaaggaaacatgggaaacatggtggacagagtattggcaagccacctggattcctgagtgggagtttgttaatacccctcccttagtgaaattatggtaccagttagagaaagaacccatagtaggagcagaaaccttctatgtagatggggcagctaacagggagactaaattaggaaaagcaggatatgttactaatagaggaagacaaaaagttgtcaccctaactgacacaacaaatcagaagactgagttacaagcaatttatctagctttgcaggattcgggattagaagtaaacatagtaacagactcacaatatgcattaggaatcattcaagcacaaccagatcaaagtgaatcagagttagtcaatcaaataatagagcagttaataaaaaaggaaaaggtctatctggcatgggtaccagcacacaaaggaattggaggaaatgaacaagtagataaattagtcagtgctggaatcaggaaagtactatttttagatggaatagataaggcccaagatgaacatgagaaatatcacagtaattggagagcaatggctagtgattttaacctgccacctgtagtagcaaaagaaatagtagccagctgtgataaatgtcagctaaaaggagaagccatgcatggacaagtagactgtagtccaggaatatggcaactagattgtacacatttagaaggaaaagttatcctggtagcagttcatgtagccagtggatatatagaagcagaagttattccagcagaaacagggcaggaaacagcatattttcttttaaaattagcaggaagatggccagtaaaaacaatacatactgacaatggcagcaatttcaccggtgctacggttagggccgcctgttggtgggcgggaatcaagcaggaatttggaattccctacaatccccaaagtcaaggagtagtagaatctatgaataaagaattaaagaaaattataggacaggtaagagatcaggctgaacatcttaagacagcagtacaaatggcagtattcatccacaattttaaaagaaaaggggggattggggggtacagtgcaggggaaagaatagtagacataatagcaacagacatacaaactaaagaattacaaaaacaaattacaaaaattcaaaattttcgggtttattacagggacagcagaaatccactttggaaaggaccagcaaagctcctctggaaaggtgaaggggcagtagtaatacaagataatagtgacataaaagtagtgccaagaagaaaagcaaagatcattagggattatggaaaacagatggcaggtgatgattgtgtggcaagtagacaggatgaggattagaacatggaaaagtttagtaaaacaccatatgtatgtttcagggaaagctaggggatggttttatagacatcactatgaaagccctcatccaagaataagttcagaagtacacatcccactaggggatgctagattggtaataacaacatattggggtctgcatacaggagaaagagactggcatttgggtcagggagtctccatagaatggaggaaaaagagatatagcacacaagtagaccctgaactagcagaccaactaattcatctgtattactttgactgtttttcagactctgctataagaaaggccttattaggacacatagttagccctaggtgtgaatatcaagcaggacataacaaggtaggatctctacaatacttggcactagcagcattaataacaccaaaaaagataaagccacctttgcctagtgttacgaaactgacagaggatagatggaacaagccccagaagaccaagggccacagagggagccacacaatgaatggacactagagcttttagaggagcttaagaatgaagctgttagacattttcctaggatttggctccatggcttagggcaacatatctatgaaacttatggggatacttgggcaggagtggaagccataataagaattctgcaacaactgctgtttatccattttcagaattgggtgtcgacatagcagaataggcgttactcgacagaggagagcaagaaatggagccagtagatcctagactagagccctggaagcatccaggaagtcagcctaaaactgcttgtaccaattgctattgtaaaaagtgttgctttcattgccaagtttgtttcataacaaaagccttaggcatctcctatggcaggaagaagcggagacagcgacgaagagctcatcagaacagtcagactcatcaagcttctctatcaaagcagtaagtagtacatgtaatgcaacctataccaatagtagcaatagtagcattagtagtagcaataataatagcaatagttgtgtggtccatagtaatcatagaatataggaaaatattaagacaaagaaaaatagacaggttaattgatagactaatagaaagagcagaagacagtggcaatgagagtgaaggagaaatatcagcacttgtggagatgggggtggagatggggcaccatgctccttgggatgttgatgatctgtagtgctacagaaaaattgtgggtcacagtctattatggggtacctgtgtggaaggaagcaaccaccactctattttgtgcatcagatgctaaagcatatgatacagaggtacataatgtttgggccacacatgcctgtgtacccacagaccccaacccacaagaagtagtattggtaaatgtgacagaaaattttaacatgtggaaaaatgacatggtagaacagatgcatgaggatataatcagtttatgggatcaaagcctaaagccatgtgtaaaattaaccccactctgtgttagtttaaagtgcactgatttgaagaatgatactaataccaatagtagtagcgggagaatgataatggagaaaggagagataaaaaactgctctttcaatatcagcacaagcataagaggtaaggtgcagaaagaatatgcatttttttataaacttgatataataccaatagataatgatactaccagctataagttgacaagttgtaacacctcagtcattacacaggcctgtccaaaggtatcctttgagccaattcccatacattattgtgccccggctggttttgcgattctaaaatgtaataataagacgttcaatggaacaggaccatgtacaaatgtcagcacagtacaatgtacacatggaattaggccagtagtatcaactcaactgctgttaaatggcagtctagcagaagaagaggtagtaattagatctgtcaatttcacggacaatgctaaaaccataatagtacagctgaacacatctgtagaaattaattgtacaagacccaacaacaatacaagaaaaagaatccgtatccagagaggaccagggagagcatttgttacaataggaaaaataggaaatatgagacaagcacattgtaacattagtagagcaaaatggaataacactttaaaacagatagctagcaaattaagagaacaatttggaaataataaaacaataatctttaagcaatcctcaggaggggacccagaaattgtaacgcacagttttaattgtggaggggaatttttctactgtaattcaacacaactgtttaatagtacttggtttaatagtacttggagtactgaagggtcaaataacactgaaggaagtgacacaatcaccctcccatgcagaataaaacaaattataaacatgtggcagaaagtaggaaaagcaatgtatgcccctcccatcagtggacaaattagatgttcatcaaatattacagggctgctattaacaagagatggtggtaatagcaacaatgagtccgagatcttcagacctggaggaggagatatgagggacaattggagaagtgaattatataaatataaagtagtaaaaattgaaccattaggagtagcacccaccaaggcaaagagaagagtggtgcagagagaaaaaagagcagtgggaataggagctttgttccttgggttcttgggagcagcaggaagcactatgggcgcagcctcaatgacgctgacggtacaggccagacaattattgtctggtatagtgcagcagcagaacaatttgctgagggctattgaggcgcaacagcatctgttgcaactcacagtctggggcatcaagcagctccaggcaagaatcctggctgtggaaagatacctaaaggatcaacagctcctggggatttggggttgctctggaaaactcatttgcaccactgctgtgccttggaatgctagttggagtaataaatctctggaacagatttggaatcacacgacctggatggagtgggacagagaaattaacaattacacaagcttaatacactccttaattgaagaatcgcaaaaccagcaagaaaagaatgaacaagaattattggaattagataaatgggcaagtttgtggaattggtttaacataacaaattggctgtggtatataaaattattcataatgatagtaggaggcttggtaggtttaagaatagtttttgctgtactttctatagtgaatagagttaggcagggatattcaccattatcgtttcagacccacctcccaaccccgaggggacccgacaggcccgaaggaatagaagaagaaggtggagagagagacagagacagatccattcgattagtgaacggatccttggcacttatctgggacgatctgcggagcctgtgcctcttcagctaccaccgcttgagagacttactcttgattgtaacgaggattgtggaacttctgggacgcagggggtgggaagccctcaaatattggtggaatctcctacagtattggagtcaggaactaaagaatagtgctgttagcttgctcaatgccacagccatagcagtagctgaggggacagatagggttatagaagtagtacaaggagcttgtagagctattcgccacatacctagaagaataagacagggcttggaaaggattttgctataagatgggtggcaagtggtcaaaaagtagtgtgattggatggcctactgtaagggaaagaatgagacgagctgagccagcagcagatagggtgggagcagcatctcgagacctggaaaaacatggagcaatcacaagtagcaatacagcagctaccaatgctgcttgtgcctggctagaagcacaagaggaggaggaggtgggttttccagtcacacctcaggtacctttaagaccaatgacttacaaggcagctgtagatcttagccactttttaaaagaaaaggggggactggaagggctaattcactcccaaagaagacaagatatccttgatctgtggatctaccacacacaaggctacttccctgattagcagaactacacaccagggccaggggtcagatatccactgacctttggatggtgctacaagctagtaccagttgagccagataagatagaagaggccaataaaggagagaacaccagcttgttacaccctgtgagcctgcatgggatggatgacccggagagagaagtgttagagtggaggtttgacagccgcctagcatttcatcacgtggcccgagagctgcatccggagtacttcaagaactgctgacatcgagcttgctacaagggactttccgctggggactttccagggaggcgtggcctgggcgggactggggagtggcgagccctcagatcctgcatataagcagctgctttttgcctgtactgggtctctctggttagaccagatctgagcctgggagctctctggctaactagggaacccactgcttaagcctcaataaagcttgccttgagtgcttc

SEQ ID NO: 480 - DNA, 1111 bp, Artificial Sequence
  Sythetic Oligonucleotide
agatgtcccgagttagtgcgccacgtaagcgctggggcttattattacccccagcgctcgggacgggacatttgcatctataaatagacctcccccctctccattacaagatcatcatcgacgacagaatggcgcgatatgtggtatgctggatgttcaccatcaacaatcccacaacactaccagtgatgagggatgagataaaatatatggtatatcaagtggagaggggacaggagggtactcgtcatgtgcaaggttatgtcgagatgaagagacgaagctctctgaagcagatgagaggcttcttcccaggcgcacaccttgagaaacgaaagggaagccaagaagaagcgcggtcatactgtatgaaggaagatacaagaatcgaaggtcccttcgagtttggttcatttaaattgtcatgtaatgataatttatttgatgtcatacaggatatgcgtgaaacgcacaaaaggcctttggagtatttatatgattgtcctaacaccttcgatagaagtaaggatacattatacagagtacaagcagagatgaataaaacgaaggcgatgaatagctggagaacttctttcagtgcttggacatcagaggtggagaatatcatggcgcagccatgtcatcggagaataatttgggtctatggcccaaatggaggagaaggaaagacaacgtatgcaaaacatctaatgaagacgagaaatgcgttttattctccaggaggaaaatcattggatatatgtagactgtataattacgaggatattgttatatttgatattccaagatgcaaagaggattatttaaattatgggttattagaggaatttaagaatggaataattcaaagcgggaaatatgaacccgttttgaagatagtagaatatgtcgaagtcattgtaatggctaacttccttccgaaggaaggaatcttttctgaagatcgaataaagttggtttcttgctgaacaagtaatgactttacagcgcacgctccgacaaaagcacactatgacaaaagtacgggtatctgattgggttatcttaacgatctagggccgtaggcccgtgagcaatgaacggcgagatc

SEQ ID NO: 481 - DNA, 1089 bp, Artificial Sequence
  Sythetic Oligonucleotide
agcacgggggactattattaccccccgtgctcgggacgggacatgacgtcagcaaggattataatgggctttttattagcccatttattgaattgggccgggttttgtcattttacaaaagcccggtccaggataagtataatgtcacgtgccgaattaaaaggttgcttcgccacgaagaaacctaatttgaggttgcgtattcaatacgctaccgaatatctattaatatgtgagtctctgccgaaaaaaatcagagcgaaagcggaaggcagaagcgatggattgggcggaatcacaattcaagacctgtactcatggatgcgattggaagaagatatcatcggattcagccgataatcgacaatatgtaccatgcgtcgattctggagctggaagaaagtcgcctcgcaaggtacttcttagatctattgaagctgtgtttaacggaagcttcagcggaaataataggaatgttcgtggatttctctacgtatcgatcagagacgatgacggagaaatgcgtccagtactcatagtaccattcggaggatatggatatcataatgatttttattatttcgaagggaaggggaaagttgaatgtgatatatcatcagattatgttgcgccaggaatagattggagcagagacatggaagttagtattagtaacagcaacaactgtaatgaattatgtgatctgaagtgttatgttgtttgttcgttaagaatcaaggaataaaagttgtgctgtaatgttaattaataaaacgtatatttgggaaattgatagttgtataaaacatacaacacactatgaaatacaagacgctatgacaaatgtacgggtatctgaatgagttttagtatcgcttaagggccgcaggcccgttaaaaataataatcgaattataaacgttagataataatcagagataggtgatcagataatataaacataaacgaagtatatgccggtacaataataaaataagtaataacaaaaaaaatatgtatactaatctctgattggttcaggagaaaggcccaccaactaaaaggtggggagaatgtcccgatgacgta

SEQ ID NO: 482 - DNA, 1043 bp, Artificial Sequence
  Sythetic Oligonucleotide
agcgctggggcttattattacccccagcgctcgggacgggacatcacgtgcgtcaacaaatgcacgtgactgatataagggacataacgggtttagataacggtttatgcggattagaatataacgtcacgtgtgaaagccgaaaggcacgtgacgaagacaaatggattgaataaacatttgacgtccggtagcttccgaaggaagtaagcttcgcggcgaagcaaaccatttatatatttgcgtaggcttgcggcctataaataggacgcagctaaatggcattaacaacagagcgggtgaaactattctttgaatggtttctgttctttggagcaatatttattgcgattacaatattatatatattgttggttttgctctttgaggtacccaggtatattaaggagctcgtgaggtgtttggtagaatacctgaccagacgacgtgtatggatgcagaggacgcagttgacggaggcaactggagatgtagagatcggcagaggtattgtggaagacagacgagatcaagaaccggctgtcataccacatgtatctcaggtaatcccttctcaaccaaatagaagggatgatcaaggaagacgaggaaacgctggacctatgttctaatacacggtatattaatatacgaaatataaatgggtattgatgtaaatgatcatacataatatatgtatgataatgaaacatattgtaatatgtgaattgtaaacgagagttgtatgtataaaacatacaacacgctatgaaatacaagacgctatgacaaaagtactggtatatgattaggtatcctaacgatctagggccgaaggcccgtgagcaatatgcgtcgaaataatgtttaacaaacaaatatacatgatacggatagttgaatacataaacaacgaggtatacaatacaacaaactgttgtaaagaaataaaaaataagaagagatagtatatttgtgttggataagccttgcaaccaccactttagtggtgggccagatgtcccgagttagtgcgccacgta

SEQ ID NO: 483 - DNA, 1018 bp, Artificial Sequence
  Sythetic Oligonucleotide
agcgctggggcttattattacccccagcgctcgggacgggacatcacgtgcaactaacagacgcacgtgagaatgcagtagcttgcagcgaaagatagacgtcaacatcaataaagaagaaggaatattctttgcttcggcacgaagcaaagggtatagatatttgttcgagatgcgaaaatggaggctatttaaacctgatggttttgtgatttccgaaatcactcgtcggaagagaaatggagttctgggaatcgtctgccatgcctgacgatgtcaagagagagattaaggaaatatattgggaagatcggaagaaacttctgttctgtcagaagttgaagagctatgtcagaaggattcttgtttatggagatcaagaggatgcccttgccggagtgaaggatatgaagacttctattattcgctatagcgaatacttgaagaaaccatgtgtggtaatttgttgtgttagcaataaatcaattgtgtataggttaaacagcatggtgttcttttatcatgaataccttgaagaactaggtggtgattactcagtatatcaagatctctattgtgatgaggtactctcttcttcatcgacagaggaagaagatgtaggagtaatatataggaatgttatcatggcatcgacacaagagaagttctcttggagtgattgtcagcagatagttatatcagactatgatgtaacattactctaatgtaatatccattatcatcaataaaataatggaatgttgattatgtatttatcataaatacataatggtatacgtatagcataaaatacattaaccaacatacaacacactataaaatacaacacactataacaaatgtacgggtatttgattgggctatattaaccccttaagggccgaaggcccgtttaaatatgtgttggacgaagtccaaacacaaaaaagtaagcagaacaacggaataatatgagctggcaacgtagggtccatgtcccgagttagtgcgccacgta

SEQ ID NO: 484 - DNA, 1060 bp, Artificial Sequence
  Sythetic Oligonucleotide
ggcgctggggcttattattacccccagcgccgggacgggacatgggctttttaaatgggctttgcgagtttgaacagttcagtatcttcgttattgggccaacccggcccaataattaagagaacgtgttcaaattcgtggtatgaccgaaggtcaaggtaaccggtcaacattattctggcttgcgcagcaagatacacgaattaatttattaattcgtaggacacgtggacggaccgaaatactcttgcatctctataaataccctaatcctgtcaaggataattgctctctctcttctgtcaaggtggttgtgctgaggcggaagatcgccagcggcgatcgtcggaacgacctgcatctagagaggcggcgaggaaactacgaagcgtatatcgggtatttatagacttatagcgtagctagaagtatacactgtacagatattgtatcttgtaaattacgaagcaattcgtatttgatattaataaaacaactgggtttgttaatgtttacattaactagtatcttatatgtacaaattaaaatacagtatacggaacgtatactaacgtaaaaattaaatgataggcgaagcatgattaacaggtgtttaggtataattaacataattatgagaagtaataataatacggaaaatgaataagtatgaggtgaaagaggagatattagaatatttaaaaacccaattatattattttggaacgaaatacaacacgctatgaaatacaagacgctatgacaaatgtacgggaatatgattgtgtatcttaacgtataagggccgcaggcccgtcaagttgaatgaacggtccagattaattccttagcgacgaagaaaggaatcttaaaggggaccacattaaagacagctgtcattgattaaataaataatataataaccaaaagacctttgtacccttcctaatgatgacgtataggggtgtcccgatgtaatttaacatagctctgaaaagagatatgggccgttggatgcctccatcggacgatggaggttgaatgaacttctgctgacgta

SEQ ID NO: 485 - DNA, 1075 bp, Artificial Sequence
  Sythetic Oligonucleotide
agcgctggggactattattacccccagcgctcgggacgggacatgggctaatggattgtggatatagggcccaaagggcccgtttagatgggttttgggctcatgggctttatccagaagaccaaaaacaggcgggaaccgtcccaaattcaaacttcgattgcttgccctgcaacgcatctagaagtctataaataccagtgtctagatagatgttcagacaagaaatggctaggtatccgaagaaatccatcaagaagaggcgggttgggcgccggaagtatggcagcaaggcggcaacgagccacgactactcgtcgtcagggtcaatattggttcctgaaaacaccgtcaaggtatttcggattgagcctactgataaaacattacccagatattttatctggaaaatgtttatgcttcttgtgtgcaaggtgaagcccggaagaatacttcattgggctatgatcaagagttcttgggaaatcaaccagccgacaacctgtctggaagccccaggtttatttattaaacctgaacacagccatctggttaaactggtatgtagtggggaacttgaagcaggagtcgcaacaggaacatcagatgttgaatgtcttttgaggaagacaaccgtgttgaggaagaatgtaacagaggtggattatttatatttggcattctattgtagttctggagtaagtataaactaccagaacagaattacatatcatgtttgatatgtttatgtaaacataaactattgtatggaatgaaatccaaataacatacaacacgctatgaaatacaagacgctatgacaaaagtactggtatatgattaggtatcctaacgatctagggccgaaggcccgtgagcaatatgcgtcgaaataatgtttaacaaacaaatatacatgatacggatagttgaatacataaacaacgaggtatacaatacaacaaactgttgtaaagaaataaaaaataagaagagagagtatatttgtgtcggataagcatcacacccaccactttagtggtgggccagatgtcccgagttagtgcgccacgta

SEQ ID NO: 486 - DNA, 28 bp, Artificial Sequence
  Sythetic Oligonucleotide
ccctcgaggtatttttacaacaattacc

SEQ ID NO: 487 - DNA, 19 bp, Artificial Sequence
  Sythetic Oligonucleotide
aggtcaacttgtctccatc

SEQ ID NO: 488 - DNA, 20 bp, Artificial Sequence
  Sythetic Oligonucleotide
cttatcagagtggcaggcga

SEQ ID NO: 489 - DNA, 20 bp, Artificial Sequence
  Sythetic Oligonucleotide
ccaatcatcgcatgtcacca

SEQ ID NO: 490 - DNA, 21 bp, Artificial Sequence
  Sythetic Oligonucleotide
ggacacttcaatccaaacgga

SEQ ID NO: 491 - DNA, 20 bp, Artificial Sequence
  Sythetic Oligonucleotide
gagaaatacttcaccagact

SEQ ID NO: 492 - DNA, 28 bp, Artificial Sequence
  Sythetic Oligonucleotide
ggctcgagatgtcttacagtatcactac

SEQ ID NO: 493 - DNA, 28 bp, Artificial Sequence
  Sythetic Oligonucleotide
ccggatcctgggcccctaccgggggtaa

SEQ ID NO: 494 - DNA, 28 bp, Artificial Sequence
  Sythetic Oligonucleotide
ccctcgaggtatttttacaacaattacc

SEQ ID NO: 495 - DNA, 19 bp, Artificial Sequence
  Sythetic Oligonucleotide
aggtcaacttgtctccatc

SEQ ID NO: 496 - DNA, 19 bp, Artificial Sequence
  Sythetic Oligonucleotide
catacgtcaatttggacga

SEQ ID NO: 497 - DNA, 20 bp, Artificial Sequence
  Sythetic Oligonucleotide
atatagatcaggcaccctga

SEQ ID NO: 498 - DNA, 20 bp, Artificial Sequence
  Sythetic Oligonucleotide
cttatcagagtggcaggcga

SEQ ID NO: 499 - DNA, 20 bp, Artificial Sequence
  Sythetic Oligonucleotide
ccaatcatcgcatgtcacca

SEQ ID NO: 500 - DNA, 20 bp, Artificial Sequence
  Sythetic Oligonucleotide
gtggcgcttttggaatatga

SEQ ID NO: 501 - DNA, 20 bp, Artificial Sequence
  Sythetic Oligonucleotide
caatgatggagactggtgta

SEQ ID NO: 502 - DNA, 19 bp, Artificial Sequence
  Synthetic Polypeptide
taagtgcaaggcgagacat

SEQ ID NO: 503 - DNA, 21 bp, Artificial Sequence
  Sythetic Oligonucleotide
ggtacacaatcgtctgcaaag

SEQ ID NO: 504 - DNA, 21 bp, Artificial Sequence
  Sythetic Oligonucleotide
ggacacttcaatccaaacgga

SEQ ID NO: 505 - DNA, 20 bp, Artificial Sequence
  Sythetic Oligonucleotide
gacaaatacttcaccagact

SEQ ID NO: 506 - DNA, 21 bp, Artificial Sequence
  Sythetic Oligonucleotide
acgctgttggggaggttcata

SEQ ID NO: 507 - DNA, 22 bp, Artificial Sequence
  Sythetic Oligonucleotide
tgagggaaaggtttccacacct

What is claimed is:

1. A vaccine, comprising:
an isolated plant viral antigen, wherein the plant viral antigen is immunogenic, and a pharmaceutically acceptable carrier.

2. The vaccine of claim 1, wherein the plant viral antigen is an immunogenic peptide, and optionally further comprising an adjuvant.

3. The vaccine of claim 1, wherein the plant viral antigen is a nucleic acid comprising at least one gene encoding a plant viral peptide and optionally further comprising:
a replication defective vector comprising the nucleic acid, and/or
wherein the gene is operably linked to a heterologous promoter and transcription terminator, the replication defective vector is optionally an adenoviral vector.

4. The vaccine of claim 1, wherein the plant viral antigen is a plant virus selected from the group consisting of Maize chlorotic mottle virus; Maize rayado fino virus; Oat chlorotic stunt virus; Chayote mosaic tymovirus; Grapevine asteroid mosaic-associated virus; Grapevine fleck virus; Grapevine Red Globe virus; Grapevine rupestris vein feathering virus; Melon necrotic spot virus; Physalis mottle tymovirus; Prunus necrotic ringspot; Nigerian tobacco latent virus; Tobacco mild green mosaic virus; Tobacco mosaic virus; Tobacco necrosis virus; Eggplant mosaic virus; Kennedya yellow mosaic virus; Lycopersicon esculentum TVM viroid; Oat blue dwarf virus; Obuda pepper virus; Olive latent virus 1; Paprika mild mottle virus; PMMV; Tomato mosaic virus; Turnip vein-clearing virus; Carnation mottle virus; Cocksfoot mottle virus; Galinsoga mosaic virus; Johnsongrass chlorotic stripe mosaic virus; Odontoglossum ringspot virus; Ononis yellow mosaic virus; Panicum mosaic virus; Poinsettia mosaic virus; Pothos latent virus; and Ribgrass mosaic virus.

5. The vaccine of claim 1, further comprising an agent selected from:
a TLR agonist,
a CLIP inhibitor, wherein the CLIP inhibitor is optionally FRIMAVLAS (SEQ ID NO. 439),
a fatty acid metabolism inhibitor, and/or
an autophagy inhibitor.

6. A method of modulating gastrointestinal plant viral levels in a subject, comprising:
administering to the subject an amount of a plant virus vaccine effective to modulate the plant virus levels in the gastrointestinal tract of the subject, wherein the plant virus vaccine is optionally a vaccine of claim 1.

7. The method of claim 6, wherein the levels of plant virus in the gastrointestinal system of the subject corresponding to the plant virus vaccine are decreased in the gastrointestinal system of the subject relative to the levels that are observed in the absence of the administration of the plant virus vaccine, optionally, wherein the levels of plant virus in the gastrointestinal system of the subject are measured in a fecal or blood sample.

8. A method, comprising:
administering to a subject at risk of having a plant virus associated cancer, a plant virus vaccine in an effective amount to inhibit infection with the plant virus in the subject, wherein the plant virus vaccine is optionally a vaccine of claim 1.

9. The method of claim 8, wherein the subject has been exposed to a plant virus.

10. A method for treating a subject, comprising:
administering an anti-viral compound to the subject, wherein the subject has a disease associated with a plant virus, in an effective amount to reduce infection with the plant virus in the subject.

11. The method of claim 10, further comprising administering an agent selected from:
a TLR agonist, wherein the TLR agonist optionally is TLR3 agonist such as poly(I:C), a TLR7 agonist, a TLR8 agonist or a TLR9 agonist such as a CpG oligonucleotide,
a CLIP inhibitor, wherein the CLIP inhibitor is optinally FRIMAVLAS (SEQ ID NO. 439),
a fatty acid metabolism inhibitor, and/or
an autophagy inhibitor.

12. A method, comprising:
determining whether a subject having a virally caused disease, such as cancer, has been exposed to a plant virus that causes the disease, and treating the subject with a compound that is a plant defense mechanism against the plant virus in an effective amount to reduce infection of the subject with the plant virus.

13. The method of claim 12, wherein the compound is a naturally occurring substance found in a plant susceptible to the plant virus or is an analog, homolog, or derivative thereof and is optionally selected from the group consisting of flavonoids, anthocyanins, phytoalexins, medicarpin, rishitin, camalexin, capsaisin, glucosinolate, defensins, alpha-amylase, protease inhibitors, lignin and furanocoumarins.

14. The method of claim 12, wherein the step of determining whether the subject has been exposed to the plant virus involves analyzing a biological sample of the subject for the presence of the plant virus, wherein the biological sample optionally is a fecal sample.

15. A method for silencing plant virus gene expression in a mammal needing relief from the gene expression, comprising:
administering to the mammal an inhibitory nucleic acid that targets the genome of an essential plant virus in an effective amount to reduce infection of the mammal with the plant virus.

16. The method of claim 15, wherein the inhibitory nucleic acid comprises:
a) a double stranded nucleic acid of 15 to 30 nucleotides in length,
b) a first nucleotide sequence that targets the genome of the essential plant virus and a second nucleotide that is a complement of the first nucleotide sequence, and/or
c) a nucleotide sequence having sufficient complementarity to a target sequence of about 15 to about 30 contiguous nucleotides in an RNA of a virus for the inhibitory nucleic acid to direct cleavage of the RNA via RNA interference, wherein the virus is selected from the group consisting of Maize chlorotic mottle virus; Maize rayado fino virus; Oat chlorotic stunt virus; Chayote mosaic tymovirus; Grapevine asteroid mosaic-associated virus; Grapevine fleck virus; Grapevine Red Globe virus; Grapevine rupestris vein feathering virus; Melon necrotic spot virus; Physalis mottle tymovirus; Prunus necrotic ringspot; Nigerian tobacco latent virus; Tobacco mild green mosaic virus; Tobacco mosaic virus; Tobacco necrosis virus; Eggplant mosaic virus; Kennedya yellow mosaic virus; Lycopersicon esculentum TVM viroid; Oat blue dwarf virus; Obuda pepper virus; Olive latent virus 1; Paprika mild mottle virus; PMMV; Tomato mosaic virus; Turnip vein-clearing virus; Carnation mottle virus; Cocksfoot mottle virus; Galinsoga mosaic virus; Johnsongrass chlorotic stripe mosaic virus; Odontoglossum ringspot virus; Ononis yellow mosaic virus; Panicum mosaic virus; Poinsettia mosaic virus; Pothos latent virus; and Ribgrass mosaic virus, wherein the target sequence is in a gene essential for infectivity or replication of the virus, wherein the gene essential for infectivity or replication of the virus is optionally selected from the group consisting of plant virus genome-linked protein (VPg), VPg-Pro, the 3′UTR, the 5′ UTR, zinc finger region of the capsid protein, and tRNA like domain.

17. A composition comprising: a vector comprising a nucleic acid encoding an inhibitory nucleic acid that targets the genome of an essential plant virus operably linked to a mammalian promoter.

18. A method, comprising:
performing a physical analytical step on a biological sample, optionally a fecal sample, of a subject,
identifying the presence of plant virus in the biological sample based on the physical analytical step, and
determining a course of treatment for the subject based on the presence of the plant virus, wherein the presence of the plant virus is indicative of a predisposition to cancer.

19. The method of claim 18, wherein the plant virus is selected from the group consisting of tobacco mosaic virus, Maize chlorotic mottle virus; Maize rayado fino virus; Oat chlorotic stunt virus; Chayote mosaic tymovirus; Grapevine asteroid mosaic-associated virus; Grapevine fleck virus; Grapevine Red Globe virus; Grapevine rupestris vein feathering virus; Melon necrotic spot virus; Physalis mottle tymovirus; Prunus necrotic ringspot; Nigerian tobacco latent virus; Tobacco mild green mosaic virus; Tobacco necrosis virus; Eggplant mosaic virus; Kennedya yellow mosaic virus; Lycopersicon esculentum TVM viroid; Oat blue dwarf virus; Obuda pepper virus; Olive latent virus 1; Paprika mild mottle virus; PMMV; Tomato mosaic virus; Turnip vein-clearing virus; Carnation mottle virus; Cocksfoot mottle virus; Galinsoga mosaic virus; Johnsongrass chlorotic stripe mosaic virus; Odontoglossum ringspot virus; Ononis yellow mosaic virus; Panicum mosaic virus; Poinsettia mosaic virus; Pothos latent virus; and Ribgrass mosaic virus.

20. The method of claim 18, further comprising analyzing the status of inflammation in the subject.

21. The method of claim 18, wherein the course of treatment is the administration of a plant virus vaccine, optionally the plant virus vaccine claim 1.

22. A method for treating a plant virus associated cancer, comprising:
administering to a subject having a plant virus associated cancer an anti-viral compound in an effective amount to treat the cancer, wherein the anti-viral compound is a compound that interferes with viral synthesis.

23. The method of claim 22, wherein the anti-viral compound is selected from:
a) an inhibitor of plant specific RNA dependent RNA polymerase,
b) an inhibitor that is an RNA dependent RNA polymerase antagonist,
c) an RNA dependent RNA polymerase antagonist that is an inhibitory peptide, such as an antibody,
d) an RNA dependent RNA polymerase antagonist that is an inhibitory nucleic acid, and/or
e) an inhibitory nucleic acid that is an siRNA.

24. A method for identifying an anti-cancer agent, comprising:
performing a physical analytical step on a plant to determine a plant defense mechanism for preventing infection with a plant virus,
identifying an association of the plant virus with a mammalian cancer, and
selecting the plant defense mechanism as an anti-cancer agent for the mammalian cancer.

25-29. (canceled)
